(19) United States
(12) Patent Application Publication
(10) Pub. No.: US 2024/0175035 A1
(43) Pub. Date: May 30, 2024

(54) COMPOSITIONS AND METHODS FOR TREATING HYPERCHOLESTEROLEMIA

(71) Applicant: EmendoBio Inc., Wilmington, DE (US)

(72) Inventors: Rafi Emmanuel, Ramla (IL); Michal Golan Mashiach, Ness Ziona (IL); Joseph Dicken, Rehovot (IL)

(73) Assignee: EmendoBio Inc., Wilmington, DE (US)

(21) Appl. No.: 18/551,817

(22) PCT Filed: Mar. 22, 2022
(86) PCT No.: PCT/US2022/021263

§ 371 Date: Sep. 21, 2023

Related U.S. Application Data
(60) Provisional application No. 63/304,170, filed on Jan. 28, 2022.
(60) Provisional application No. 63/164,396, filed on Mar. 22, 2021.

(51) Int. Cl. C12N 15/113; A61K 31/7088; A61K 38/46; A61P 3/06; C12N 9/22; C12N 15/11; C12N 15/90

(52) U.S. Cl. CPC C12N 15/1138; A61K 31/7088; A61K 38/465; A61P 3/06; C12N 9/22; C12N 15/11; C12N 15/907; C12N 2310/14; C12N 2310/141; C12N 2310/20; C12N 2310/531; C12N 2800/80

(57) ABSTRACT

RNA molecules comprising a guide sequence portion having 17-50 contiguous nucleotides containing nucleotides in the sequence set forth in any one of SEQ ID NOs: 1-10736 and compositions, methods, and uses thereof.

[0001] This application claims the benefit of U.S. Provisional Application Nos. 63/304,170, filed Jan. 28, 2022, and 63/164,396, filed Mar. 22, 2021, the contents of each of which are hereby incorporated by reference.

[0002] Throughout this application, various publications are referenced, including referenced in parenthesis. The disclosures of all publications mentioned in this application in their entireties are hereby incorporated by reference into this application in order to provide additional description of the art to which this invention pertains and of the features in the art which can be employed with this invention.

### REFERENCE TO SEQUENCE LISTING

[0003] This application incorporates-by-reference nucleotide sequences which are present in the file named “220321_91709-A-PCT_Sequence_Listing_AWG.txt”, which is 2,288 kilobytes in size, and which was created on Mar. 17, 2022 in the IBM-PC machine format, having an operating system compatibility with MS-Windows, which is contained in the text file filed Mar. 21, 2021 as part of this application.

### BACKGROUND OF INVENTION

[0004] Hypercholesterolemia, or high cholesterol, is defined as the presence of high plasma cholesterol levels. Familial hypercholesterolemia (FH) is a hereditary disease primarily due to mutations in the Low-Density Lipoprotein Receptor (LDLR) that lead to elevated cholesterol and premature development of cardiovascular disease.

[0005] Low-Density Lipoprotein Receptor (LDLR) binds Low-Density Lipoprotein (LDL), which is the major cholesterol-carrying lipoprotein of plasma, and transports it into cells by endocytosis. In order to be internalized, the receptor-ligand complexes must first cluster into clathrin-coated pits. Elevated levels of LDL cholesterol play a central role in the pathogenesis of coronary heart disease. Defects in the LDL receptor or its regulation result in high levels of LDL and premature cardiovascular disease, as demonstrated by the high impact loss-of function mutations in the LDLR gene that cause familial hypercholesterolemia.

[0006] Lifelong lipid-lowering medications such as statins or Ezetimibe are currently available, however, they are often intolerable by some patients and fail to attain desired LDL-C levels. A more recent therapeutic approach is based on subcutaneously injected monoclonal antibodies that transiently inhibit Proprotein Convertase Subtilisin/Kexin type 9 (PCSK9), a protein that promotes LDLR lysosomal degradation. Permanent inhibition of PCSK9 by base editing is currently being developed, but the long-lasting consequences of such irreversible knockdown of a gene that is not even the pathogenic basis of FH remain unknown.

### SUMMARY OF THE INVENTION

[0007] Disclosed are approaches for increasing expression of the endogenous LDLR gene or the half-life of its transcript to treat or prevent high cholesterol or hypercholesterolemia (e.g., familial hypercholesterolemia). According to some aspects of the invention, the disclosed approaches are for targeting the 3′ untranslated region (UTR) of the LDLR gene to treat or prevent high cholesterol or hypercholesterolemia (e.g., familial hypercholesterolemia). Without limiting the scope to any mechanism of action, according to some aspects of the invention, the disclosed approaches are for knocking out, removing, truncating, or blocking a region in the 3′ untranslated region (UTR) responsible for restricting LDLR transcription and/or translation in order to enhance its expression and boost low-density lipoprotein cholesterol (LDL-C) uptake. Accordingly, biallelic excision or knockout of regulatory elements binding sites (e.g., miRNA binding sites) in the 3′ UTR of the LDLR gene, preferably in a liver cell such as a hepatocyte, for example, as described herein may be utilized to increase the half-life or expression levels of LDLR molecules, and thereby treat, inhibit, prevent, and/or ameliorate hypercholesterolemia. In some embodiments, at least partial excision of the 3′ UTR of the LDLR gene, as described herein, may be utilized to increase the half-life of the transcript or expression of LDLR molecules, and thereby treat, inhibit, prevent, and/or ameliorate hypercholesterolemia.

[0008] In some embodiments, there is provided a method for increasing the expression of an endogenous Low-Density Lipoprotein Receptor (LDLR) gene in a cell, the method comprising modifying the LDLR gene or a transcript encoded by the LDLR gene. In some embodiments, there is provided a method for increasing the expression of an endogenous Low-Density Lipoprotein Receptor (LDLR) gene in a cell, the method comprising modifying, blocking, or removing at least a portion of the 3′ UTR of the LDLR gene or of an LDLR transcript.

[0009] In one embodiment, the method comprises
[0010] introducing to the cell a composition comprising:
   [0011] a CRISPR nuclease or a nucleotide molecule encoding the CRISPR nuclease; and
   [0012] an RNA molecule comprising a guide sequence portion having 17-50 nucleotides or
   [0013] a nucleotide molecule encoding the same,
[0014] wherein a complex of the CRISPR nuclease and the RNA molecule affects a double strand break in an allele of the LDLR gene.

[0015] In some embodiments, the LDLR 3′UTR or a portion thereof is excised by the combination of a first double strand break formed by a CRISPR nuclease and a first RNA molecule and a second double strand break formed by a CRISPR nuclease and a second RNA molecule.

[0016] As a non-limiting example, a portion of the LDLR 3′UTR may be excised by the combined activity of a first CRISPR complex comprising an OMNI-50 CRISPR nuclease (SEQ ID NO: 10749) and a first RNA molecule comprising a guide sequence portion that comprises SEQ ID NO: 7707 and a second CRISPR complex comprising an OMNI-50 CRISPR nuclease (SEQ ID NO: 10749) and a second RNA molecule comprising a guide sequence portion that comprises SEQ ID NO: 9843.

[0017] In another non-limiting example, a portion of the LDLR 3′UTR may be excised by the combined activity of a first CRISPR complex comprising an OMNI-79 CRISPR nuclease (SEQ ID NO: 10744) and a first RNA molecule comprising a guide sequence portion that comprises SEQ ID NO: 7871 and a second CRISPR complex comprising an OMNI-79 CRISPR nuclease (SEQ ID NO: 10744) and a second RNA molecule comprising a guide sequence portion that comprises SEQ ID NO: 9843.

[0018] According to embodiments of the present invention, there is provided an RNA molecule comprising a guide sequence portion having 17-50 contiguous nucleotides containing nucleotides in the sequence set forth in any one of SEQ ID Nos: 1-10736.

[0019] According to some embodiments of the present invention, there is provided a composition comprising an RNA molecule comprising a guide sequence portion having 17-50 contiguous nucleotides containing nucleotides in the sequence set forth in any one of SEQ ID NOs: 1-10736 and a CRISPR nuclease.

[0020] According to some embodiments of the present invention, there is provided a method for increasing the expression of a LDLR gene in a cell, for example, by inactivating a LDLR miRNA binding site in the cell, the method comprising delivering to the cell a composition comprising an RNA molecule comprising a guide sequence portion having 17-50 contiguous nucleotides containing nucleotides in the sequence set forth in any one of SEQ ID NOs: 1-10736 and a CRISPR nuclease. In some embodiments the cell is a liver cell. In some embodiments the cell is a hepatocyte. In some embodiments the cell is a stem cell. In some embodiments, the delivering to the cell is performed in vivo, ex vivo, or in vitro. In some embodiments, the delivery to the cell is performed by in vivo delivery of a lentivirus, adeno-associated virus (AAV) or nanoparticle to the liver. In some embodiments, the method is performed ex vivo and the cell is provided/explanted from an individual patient. In some embodiments, the method further comprises the step of introducing the resulting cell, with at least one modified LDLR allele containing an inactivated miRNA binding site, into the individual patient.

[0021] According to some embodiments of the present invention, there is provided a method for treating and/or preventing hypercholesterolemia (e.g., familial hypercholesterolemia), the method comprising delivering to a cell of a subject having or at risk of experiencing hypercholesterolemia a composition comprising an RNA molecule comprising a guide sequence portion having 17-50 contiguous nucleotides containing nucleotides in the sequence set forth in any one of SEQ ID NOS: 1-10736 and a CRISPR nuclease.

[0022] According to some embodiments of the present invention, there is provided use of a composition comprising an RNA molecule comprising a guide sequence portion having 17-50 contiguous nucleotides containing nucleotides in the sequence set forth in any one of SEQ ID NOS: 1-10736 and a CRISPR nuclease for inactivating a miRNA binding site of a LDLR allele in a cell, comprising delivering to the cell the composition comprising an RNA molecule comprising a guide sequence portion having 17-50 contiguous nucleotides containing nucleotides in the sequence set forth in any one of SEQ ID NOs: 1-10736 and a CRISPR nuclease.

[0023] According to embodiments of the present invention, there is provided a medicament comprising a composition comprising an RNA molecule comprising a guide sequence portion having 17-50 contiguous nucleotides containing nucleotides in the sequence set forth in any one of SEQ ID NOs: 1-10736 and a CRISPR nuclease, wherein the medicament is administered by delivering the composition to the cell.

[0024] According to some embodiments of the present invention, there is provided use of a composition comprising an RNA molecule comprising a guide sequence portion having 17-50 contiguous nucleotides containing nucleotides in the sequence set forth in any one of SEQ ID NOS: 1-10736 and a CRISPR nuclease for treating, ameliorating, or preventing hypercholesterolemia, comprising delivering to a cell of a subject having or at risk of experiencing hypercholesterolemia the composition.

[0025] According to some embodiments of the present invention, there is provided a medicament comprising a composition comprising an RNA molecule comprising a guide sequence portion having 17-50 contiguous nucleotides containing nucleotides in the sequence set forth in any one of SEQ ID NOs: 1-10736 and a CRISPR nuclease for use in treating, ameliorating, or preventing hypercholesterolemia, wherein the medicament is administered by delivering to a cell of a subject having or at risk of experiencing hypercholesterolemia the composition.

[0026] According to some embodiments of the present invention, there is provided a kit for increasing LDLR expression in a cell, comprising an RNA molecule comprising a guide sequence portion having 17-50 contiguous nucleotides containing nucleotides in the sequence set forth in any one of SEQ ID NOs: 1-10736, a CRISPR nuclease, and optionally a tracrRNA molecule; and instructions for delivering the RNA molecule, CRISPR nuclease, and optionally the tracrRNA to the cell.

[0027] According to some embodiments of the present invention, there is provided a kit for treating or preventing hypercholesterolemia in a subject, comprising an RNA molecule comprising a guide sequence portion having 17-50 contiguous nucleotides containing nucleotides in the sequence set forth in any one of SEQ ID NOs: 1-10736, a CRISPR nuclease, and/or a tracrRNA molecule; and instructions for delivering the RNA molecule, CRISPR nuclease, and optionally the tracrRNA to a cell of a subject having or at risk of hypercholesterolemia.

[0028] According to some embodiments of the present invention, there is provided a cell modified according to any one of the methods described herein or modified using any one of the compositions described herein.

### BRIEF DESCRIPTION OF THE DRAWINGS

[0029] FIGS. 1A-1H: Functional proof-of-concept of LDLR 3′UTR excision. The 3′ UTR of the LDLR gene was modified using SpCas9 and two single-guide RNAs (sgRNAs) simultaneously. This targeting was performed in HepG2 cells and either excised nearly the entire 3′ UTR region (g1+g9), the miR85 binding area (g6+g7), or a 2.5 kilobase region deletion which was previously shown to upregulate LDLR expression in FH patients (FIG. 1A). All the excised cells showed upregulation of both mRNA (measured by qRT-PCR “Rq” values. FIG. 1B), total protein abundance (measured by western blot, FIG. 1C), and membrane protein abundance (measured by flow cytometry analysis, FIG. 1D). The effect was especially pronounced in cells that underwent excision of the total 3′ UTR. Fluorescent-LDL cholesterol uptake in cells that underwent excision of 3′ UTR by guides g1+g9 was measured by flow cytometry at the indicated time points. An up to 2-fold upregulation of cholesterol uptake at all the time points was demonstrated (LDL-DyLight™ 488—cholesterol uptake, FIG. 1E). Independent 3′UTR LDLR excision experiments were performed with various pairs of sgRNAs (FIG. 1F and FIG. 1G). A cleavage map of the LDLR 3′UTR excision experiments shown in FIG. 1F and FIG. 1G, including the effect of sgRNA pairings on LDLR expression (Rq values), is shown in FIG. 1H. Note that pairings which do not encompass the ddPCR probe site are not detectable with ddPCR.

[0030] FIGS. 2A-2D: Heterozygous LDLR-mutant LCL cells from patients: Reduced levels of surface receptor confirmed in both patients. Flow cytometry analysis of membrane LDLR in mutant-patient LCL cell lines vs. WT cells (FIG. 2A). % Expression was calculated as percentage of geometric mean of each cell line out of the corresponding value for WT LCL cells (FIG. 2B). FH patient LCL cells carrying a GM1448 mutation corresponds to a deletion of Gly197 [ΔG197] (FIG. 2C), and a GM1460 mutation corresponds to substitution of tyrosine for cysteine at codon 646 [C646Y] (FIG. 2D).

[0031] FIGS. 3A-3D: Excision of LDLR 3′ UTR in Heterozygous FH patient LCL cells leads to upregulation of surface LDLR and increase in cholesterol uptake. The 3′ UTR of the LDLR gene was excised using specific guides (g1 and g9) and SpCas9 in heterozygous FH patient-derived LCL cell lines. Following excision, the cells were analyzed for LDLR expression levels and LDL-cholesterol uptake. FIG. 3A. Excision percentage of LDLR 3′ UTR as measured by ddPCR. FIG. 3B. mRNA levels of LDLR as measured by qRT-PCR. FIG. 3C. LDLR surface protein expression levels as measured by flow cytometry using a specific antibody. FIG. 3D. Uptake of LDL-Dylight-488-cholesterol measured by flow cytometry following a four (4) hour incubation.

[0032] FIGS. 4A-4C: Excision of 3′ UTR of LDLR in mouse liver cell line Hepal-6 shows compatible results to human liver HepG2 cells. 3′ UTR of LDLR gene was excised using specific guides (g1m and g6m) and SpCas9 in mouse hepatoma cell line Hepal-6. Following the excision, the cells were analyzed for LDLR expression levels and LDL-cholesterol uptake. FIG. 4A. mRNA levels of LDLR as measured by qRT-PCR. FIG. 4B. LDLR surface protein expression levels as measured by flow cytometry with a specific antibody. FIG. 4C. Uptake of LDL-Dylight-488-cholesterol measured by flow cytometry following a four (4) hour incubation.

[0033] FIGS. 5A-5C: LDLR OMNI-79 CRISPR nuclease based guide screen in the 3′UTR region. FIG. 5A. Transfection-based guide screen in Hela cells of guides targeting indicated regions 3′ UTR of LDLR with either WT OMNI-79 or OMNI-79 V5570. Several guides showed high level of editing and are further evaluated as RNP or RNA compositions. FIG. 5B. Transfection-based guide screen in Hela cells of guides targeting indicated regions 3′ UTR of LDLR with OMNI-103. High activity of multiple guide molecules using OMNI-103 CRISPR nuclease. FIG. 5C. Schematic of guide molecule LDLR target sites.

[0034] FIGS. 6A-6E: Knock-out of PCSK9 by CRISPR-based editing and its effect on LDLR expression and LDL-uptake in HepG2 cells. FIG. 6A. PCSK9 Editing—The level of editing in HepG2 cells was measured following modification of PCSK9 by specific guide molecules. FIG. 6B. PCSK9 qRT-PCR—The mRNA levels of PCSK9 in HepG2 cells following editing of PCSK9. FIG. 6C. Secreted PCSK9—The secretion of PCSK9 in PCSK9-edited cells compared to WT HepG2 cells was measured by ELISA. FIG. 6D. LDLR Expression—The membrane expression of LDLR was measured in PCSK9-modified cells compared to wild-type and LDLR 3′UTR excised cells. FIG. 6E. LDL-cholesterol Uptake—488-LDL cholesterol uptake was measured in these cells for four (4) hours with or without addition of lovastatin for 16 hours.

[0035] FIGS. 7A-7C: In order to identify regions of the LDLR 3′ UTR essential for upregulation of LDLR expression, portions of the LDLR 3′UTR were excised using several different combinations of specific sgRNAs with SpCas9 in the human hepatic carcinoma cell line HepG2. Following excision, the cells were analyzed for both mRNA and surface protein LDLR expression levels. FIG. 7A. The editing percentage of each individual sgRNA was >90% for every guide tested. FIG. 7B. Excision percentage of LDLR 3′ UTR as measured by ddPCR (in quadruplicate, where applicable), mRNA levels of LDLR as measured by qRT-PCR (presented in duplicates), and LDLR membrane protein expression levels as measured by flow cytometry using a LDLR-specific antibody for each of the indicated LDLR 3′ UTR excisions are shown in triplicate. A cleavage map of the LDLR 3′UTR excision experiments shown in FIG. 7A and FIG. 7B, including the effect of sgRNA pairings on LDLR expression (Rq values), is shown in FIG. 7C.

[0036] FIGS. 8A-8D: Excision of the LDLR 3′UTR in HepG2 cells by OMNI-50 ribonucleoprotein (RNP) complexes with guides g46 and g79. Briefly, the 3′UTR of the LDLR gene was excised using specific guides and an OMNI-50 CRISPR nuclease in the human cell line HepG2. Following the excision, the cells were analyzed for LDLR expression levels and LDL-cholesterol uptake. FIG. 8A. % Excision of the LDLR 3′UTR according to ddPCR measurement. FIG. 8B. mRNA levels of LDLR as measured by qRT-PCR. FIG. 8C. LDLR membrane protein expression levels as measured by flow cytometry with a LDLR-specific antibody. FIG. 8D. Uptake of LDL-Dylight-488-cholesterol as measured by flow cytometry following 4-hour incubation with or without lovastatin.

[0037] FIGS. 9A-9D: Excision of the LDLR 3′UTR in HepG2 cells by introduction of an OMNI-79 ribonucleoprotein (RNP) complex with guides g38 and g79 or introduction of an RNA composition comprising an OMNI-79 encoding mRNA molecule and guides g38 and g79. Briefly, the 3′UTR of the LDLR gene was excised in HepG2 using specific guides and an OMNI-79 CRISPR nuclease. Following the excision, the cells were analyzed for LDLR expression levels and LDL-cholesterol uptake. FIG. 9A. % Excision of the LDLR 3′UTR according to ddPCR measurement. FIG. 9B. mRNA levels of LDLR as measured by qRT-PCR. FIG. 9C. LDLR membrane protein expression levels as measured by flow cytometry with LDLR-specific antibody. FIG. 9D. Uptake of LDL-Dylight-488-cholesterol as measured by flow cytometry following 4-hour incubation with or without lovastatin.

[0038] FIG. 10: Schematic of CRISPR-based LDLR 3′UTR excision strategy according to an embodiment of the invention.

### DETAILED DESCRIPTION

[0039] Unless otherwise defined, all technical and/or scientific terms used herein have the same meaning as commonly understood by one of ordinary skill in the art to which the invention pertains. Although methods and materials similar or equivalent to those described herein can be used in the practice or testing of embodiments of the invention, exemplary methods and/or materials are described below. In case of conflict, the patent specification, including definitions, will control. In addition, the materials, methods, and examples are illustrative only and are not intended to be necessarily limiting.

[0040] It should be understood that the terms “a” and “an” as used above and elsewhere herein refer to “one or more” of the enumerated components. It will be clear to one of ordinary skill in the art that the use of the singular includes the plural unless specifically stated otherwise. Therefore, the terms “a,” “an” and “at least one” are used interchangeably in this application.

[0041] For purposes of better understanding the present teachings and in no way limiting the scope of the teachings, unless otherwise indicated, all numbers expressing quantities, percentages or proportions, and other numerical values used in the specification and claims, are to be understood as being modified in all instances by the term “about.” Accordingly, unless indicated to the contrary, the numerical parameters set forth in the following specification and attached claims are approximations that may vary depending upon the desired properties sought to be obtained. At the very least, each numerical parameter should at least be construed in light of the number of reported significant digits and by applying ordinary rounding techniques.

[0042] Unless otherwise stated, adjectives such as “substantially” and “about” modifying a condition or relationship characteristic of a feature or features of an embodiment of the invention, are understood to mean that the condition or characteristic is defined to within tolerances that are acceptable for operation of the embodiment for an application for which it is intended. Unless otherwise indicated, the word “or” in the specification and claims is considered to be the inclusive “or” rather than the exclusive or, and indicates at least one of, or any combination of items it conjoins.

[0043] In the description and claims of the present application, each of the verbs, “comprise,” “include” and “have” and conjugates thereof, are used to indicate that the object or objects of the verb are not necessarily a complete listing of components, elements or parts of the subject or subjects of the verb. Other terms as used herein are meant to be defined by their well-known meanings in the art.

[0044] In some embodiments of the present invention, a DNA nuclease is utilized to affect a DNA break at a target site to induce cellular repair mechanisms, for example, but not limited to, non-homologous end-joining (NHEJ). During classical NHEJ, two ends of a double-strand break (DSB) site are ligated together in a fast but also inaccurate manner (i.e. frequently resulting in mutation of the DNA at the cleavage site in the form of small insertion or deletions).

[0045] As used herein, the term “modified cells” refers to cells in which a double strand break is affected by a complex of an RNA molecule and the CRISPR nuclease as a result of hybridization with the target sequence, i.e. on-target hybridization.

[0046] As used herein, the term “targeting sequence” or “targeting molecule” refers a nucleotide sequence or molecule comprising a nucleotide sequence that is capable of hybridizing to a specific target sequence, e.g., the targeting sequence has a nucleotide sequence which is at least partially complementary to the sequence being targeted along the length of the targeting sequence. The targeting sequence or targeting molecule may be part of an RNA molecule that can form a complex with a CRISPR nuclease, either alone or in combination with other RNA molecules, with the targeting sequence serving as the targeting portion of the CRISPR complex. When the molecule having the targeting sequence is present contemporaneously with the CRISPR molecule, the RNA molecule, alone or in combination with an additional one or more RNA molecules (e.g. a tracrRNA molecule), is capable of targeting the CRISPR nuclease to the specific target sequence. As non-limiting example, a guide sequence portion of a CRISPR RNA molecule or single-guide RNA molecule may serve as a targeting molecule. Each possibility represents a separate embodiment. A targeting sequence can be custom designed to target any desired sequence.

[0047] The term “targets” as used herein, refers to preferentially hybridizing a targeting sequence of a targeting molecule to a nucleic acid having a targeted nucleotide sequence. It is understood that the term “targets” encompasses variable hybridization efficiencies, such that there is preferential targeting of the nucleic acid having the targeted nucleotide sequence, but unintentional off-target hybridization in addition to on-target hybridization might also occur. It is understood that where an RNA molecule targets a sequence, a complex of the RNA molecule and a CRISPR nuclease molecule targets the sequence for nuclease activity.

[0048] The “guide sequence portion” of an RNA molecule refers to a nucleotide sequence that is capable of hybridizing to a specific target DNA sequence, e.g., the guide sequence portion has a nucleotide sequence which is partially or fully complementary to the DNA sequence being targeted along the length of the guide sequence portion. In some embodiments, the guide sequence portion is 17, 18, 19, 20, 21, 22, 23, 24, 25, 26, 27, 28, 29, 30, 31, 32, 33, 34, 35, 36, 37, 38, 39, 40, 41, 42, 43, 44, 45, 46, 47, 48, 49 or 50 nucleotides in length, or approximately 17-50, 17-49, 17-48, 17-47, 17-46, 17-45, 17-44, 17-43, 17-42, 17-41, 17-40, 17-39, 17-38, 17-37, 17-36, 17-35, 17-34, 17-33, 17-31, 17-30, 17-29, 17-28, 17-27, 17-26, 17-25, 17-24, 17-22, 17-21, 18-25, 18-24, 18-23, 18-22, 18-21, 19-25, 19-24, 19-23, 19-22, 19-21, 19-20, 20-22, 18-20, 20-21, 21-22, or 17-20 nucleotides in length. In some embodiments, the guide sequence portion is 17-50 nucleotides. In some embodiments, the guide sequence portion is 17-25 nucleotides. In some embodiments, the guide sequence portion is 17-22 nucleotides. In some embodiments, the guide sequence portion is 17-20 nucleotides. In some embodiments, the entire length of the guide sequence portion is fully complementary to the DNA sequence being targeted along the length of the guide sequence portion. The guide sequence portion may be part of an RNA molecule that can form a complex with a CRISPR nuclease with the guide sequence portion serving as the DNA targeting portion of the CRISPR complex. When the DNA molecule having the guide sequence portion is present contemporaneously with the CRISPR molecule the RNA molecule is capable of targeting the CRISPR nuclease to the specific target DNA sequence. Each possibility represents a separate embodiment. An RNA molecule can be custom designed to target any desired sequence. Accordingly, a molecule comprising a “guide sequence portion” is a type of targeting molecule. In some embodiments, the guide sequence portion comprises a sequence that is the same as, or differs by no more than 1, 2, 3, 4, or 5 nucleotides from, a guide sequence portion described herein, e.g., a guide sequence set forth in any of SEQ ID NOs: 1-20246. Each possibility represents a separate embodiment. In some of these embodiments, the guide sequence portion is fully complementary to the target sequence, and comprises a sequence that is the same as a sequence set forth in any of SEQ ID NOs:1-20246. Throughout this application, the terms “guide molecule,” “RNA guide molecule,” “guide RNA molecule,” and “gRNA molecule” are synonymous with a molecule comprising a guide sequence portion.

[0049] The term “non-discriminatory” as used herein refers to a guide sequence portion of an RNA molecule that targets a specific DNA sequence that is common to all alleles of a gene.

[0050] In embodiments of the present invention, an RNA molecule comprises a guide sequence portion having 17-50 contiguous nucleotides containing nucleotides in the sequence set forth in any one of SEQ ID NOs: 1-10736.

[0051] The RNA molecule and or the guide sequence portion of the RNA molecule may contain modified nucleotides. Exemplary modifications to nucleotides/polynucleotides may be synthetic and encompass polynucleotides which contain nucleotides comprising bases other than the naturally occurring adenine, cytosine, thymine, uracil, or guanine bases. Modifications to polynucleotides include polynucleotides which contain synthetic, non-naturally occurring nucleosides e.g., locked nucleic acids. Modifications to polynucleotides may be utilized to increase or decrease stability of an RNA. An example of a modified polynucleotide is an mRNA containing 1-methyl pseudo-uridine. For examples of modified polynucleotides and their uses, see U.S. Pat. No. 8,278,036, PCT International Publication No. WO/2015/006747, and Weissman and Kariko (2015), hereby incorporated by reference.

[0052] As used herein, “contiguous nucleotides” set forth in a SEQ ID NO refers to nucleotides in a sequence of nucleotides in the order set forth in the SEQ ID NO without any intervening nucleotides.

[0053] In embodiments of the present invention, the guide sequence portion may be 17-50 nucleotides in length and contain 20-22 contiguous nucleotides in the sequence set forth in any one of SEQ ID NOs: 1-10736. In embodiments of the present invention, the guide sequence portion may be less than 22 nucleotides in length. For example, in embodiments of the present invention the guide sequence portion may be 17, 18, 19, 20, or 21 nucleotides in length. In such embodiments the guide sequence portion may consist of 17, 18, 19, 20, or 21 nucleotides, respectively, in the sequence of 17-22 contiguous nucleotides set forth in any one of SEQ ID NOs: 1-10736. For example, a guide sequence portion having 17 nucleotides in the sequence of 17 contiguous nucleotides set forth in SEQ ID NO: 10739 may consist of any one of the following nucleotide sequences (nucleotides excluded from the contiguous sequence are marked in strike-through):

(SEQ ID NO: 10739)
AAAAAAAUGUACUUGGUUCC
17 nucleotide guide sequence 1:
(SEQ ID NO: 10740) [symbol]
AAAAUGUACUUGGUUCC
17 nucleotide guide sequence 2:
(SEQ ID NO: 10741) [symbol]
AAAAAUGUACUUGGUUC [symbol]
17 nucleotide guide sequence 3:
(SEQ ID NO: 10742) [symbol]
AAAAAAUGUACUUGGUU [symbol]
17 nucleotide guide sequence 4:
(SEQ ID NO: 10743)
AAAAAAAUGUACUUGGU

[symbol]

[0054] In embodiments of the present invention, the guide sequence portion may be greater than 20 nucleotides in length. For example, in embodiments of the present invention the guide sequence portion may be 21, 22, 23, 24, 25, 26, 27, 28, 29, or 30 nucleotides in length. In such embodiments the guide sequence portion comprises 17-50 nucleotides containing the sequence of 20, 21 or 22 contiguous nucleotides set forth in any one of SEQ ID NOs: 1-10736 and additional nucleotides fully complimentary to a nucleotide or sequence of nucleotides adjacent to the 3′ end of the target sequence, 5′ end of the target sequence, or both.

[0055] In embodiments of the present invention a CRISPR nuclease and an RNA molecule comprising a guide sequence portion form a CRISPR complex that binds to a target DNA sequence to effect cleavage of the target DNA sequence. CRISPR nucleases, e.g. Cpf1, may form a CRISPR complex comprising a CRISPR nuclease and RNA molecule without a further tracrRNA molecule. Alternatively, CRISPR nucleases, e.g. Cas9, may form a CRISPR complex between the CRISPR nuclease, an RNA molecule, and a tracrRNA molecule. A guide sequence portion, which comprises a nucleotide sequence that is capable of hybridizing to a specific target DNA sequence, and a sequence portion that participates in CRIPSR nuclease binding, e.g. a tracrRNA sequence portion, can be located on the same RNA molecule. Alternatively, a guide sequence portion may be located on one RNA molecule and a sequence portion that participates in CRIPSR nuclease binding, e.g. a tracrRNA portion, may located on a separate RNA molecule. A single RNA molecule comprising a guide sequence portion (e.g. a DNA-targeting RNA sequence) and at least one CRISPR protein-binding RNA sequence portion (e.g. a tracrRNA sequence portion), can form a complex with a CRISPR nuclease and serve as the DNA-targeting molecule. In some embodiments, a first RNA molecule comprising a DNA-targeting RNA portion, which includes a guide sequence portion, and a second RNA molecule comprising a CRISPR protein-binding RNA sequence interact by base pairing to form an RNA complex that targets the CRISPR nuclease to a DNA target site or, alternatively, are fused together to form an RNA molecule that complexes with the CRISPR nuclease and targets the CRISPR nuclease to a DNA target site.

[0056] In embodiments of the present invention, a RNA molecule comprising a guide sequence portion may further comprise the sequence of a tracrRNA molecule. Such embodiments may be designed as a synthetic fusion of the guide portion of the RNA molecule and the trans-activating crRNA (tracrRNA). (See Jinek et al., 2012). In such an embodiment, the RNA molecule is a single guide RNA (sgRNA) molecule. Embodiments of the present invention may also form CRISPR complexes utilizing a separate tracrRNA molecule and a separate RNA molecule comprising a guide sequence portion. In such embodiments the tracrRNA molecule may hybridize with the RNA molecule via basepairing and may be advantageous in certain applications of the invention described herein.

[0057] The term “tracr mate sequence” refers to a sequence sufficiently complementary to a tracrRNA molecule so as to hybridize to the tracrRNA via basepairing and promote the formation of a CRISPR complex. (See U.S. Pat. No. 8,906,616). In embodiments of the present invention, the RNA molecule may further comprise a portion having a tracr mate sequence.

[0058] A “gene,” for the purposes of the present disclosure, includes a DNA region encoding a gene product, as well as all DNA regions which regulate the production of the gene product, whether or not such regulatory sequences are adjacent to coding and/or transcribed sequences. Accordingly, a gene includes, but is not necessarily limited to, promoter sequences, terminators, translational regulatory sequences such as ribosome binding sites and internal ribosome entry sites, enhancers, silencers, insulators, boundary elements, replication origins, matrix attachment sites and locus control regions.

[0059] “Eukaryotic” cells include, but are not limited to, fungal cells (such as yeast), plant cells, animal cells, mammalian cells and human cells.

[0060] The term “nuclease” as used herein refers to an enzyme capable of cleaving the phosphodiester bonds between the nucleotide subunits of nucleic acid. A nuclease may be isolated or derived from a natural source. The natural source may be any living organism. Alternatively, a nuclease may be a modified or a synthetic protein which retains the phosphodiester bond cleaving activity. Gene modification can be achieved using a nuclease, for example a CRISPR nuclease.

[0061] According to embodiments of the present invention, there is provided a method for increasing the expression of an endogenous Low-Density Lipoprotein Receptor (LDLR) gene in a cell, the method comprising modifying the LDLR gene or a transcript encoded by the LDLR gene.

[0062] In some embodiments, the increase of the expression of an endogenous LDLR gene in a cell is measured by an at least 10%, at least 25%, at least 50%, at least 75%, at least 100%, at least 150%, at least 200%, at least 250%, at least 300%, at least 350%, at least 400%, at least 450%, at least 500%, at least 550%, or at least 600% increase in LDLR transcript levels or LDLR protein levels relative to LDLR transcript levels or LDLR protein levels in the cell prior to modification of the LDLR gene. Methods of measuring transcript levels (e.g. qRT-PCR) and protein levels (e.g. antibody staining, flow cytometry) are known in the art.

[0063] In some embodiments, the increase of the expression of an endogenous LDLR gene results in an at least 10%, at least 25%, at least 50%, at least 75%, at least 100%, at least 150%, at least 200%, at least 250%, at least 300%, at least 350%, at least 400%, at least 450%, or at least 500% increase in LDL-C uptake by the cell relative to the LDL-C uptake by the cell prior to modification of the LDLR gene.

[0064] In some embodiments, the LDLR gene is modified by a CRISPR nuclease, a meganuclease, a transcription activator-like effector nucleases (TALEN), or a zinc finger nuclease (ZFN), or wherein a transcript encoded by the LDLR gene is modified by a small interfering RNA (siRNA), short hairpin RNA (shRNA), or microRNA (miRNA) molecule.

[0065] In some embodiments, the 3′ untranslated region (UTR) of the LDLR gene or transcript encoded by the LDLR gene is modified. For example, a transcript of the LDLR gene may be modified by binding of an siRNA molecule to the transcript. Such a modification of the transcript may be performed in order to block accessibility to the 3′ UTR of the transcript.

[0066] In some embodiments, the 3′UTR of the LDLR gene is modified by excision of the 3′ UTR or a portion thereof. In some embodiments, a region of the 3′UTR of the LDLR gene is excised. In some embodiments, a 5′ end of the excised region of the 3′ UTR is located at least 1, 2, 5, 10, 15, 20, 30, 40, 50, 60 nucleotides downstream to the end of the LDLR stop codon and a 3′ end of the excised region of the 3′ UTR is located at least 1, 2, 5, 10, 15 20, 25, 30, 40, 50, 60 nucleotides upstream to the endogenous LDLR polyadenylation signal. Each possibility represents a separate embodiment. In some embodiments, the excised region of the 3′ UTR is at least 30 nucleotides downstream to the stop codon of the LDLR gene and at least 30 nucleotides upstream to the polyadenylation signal. In some embodiments, the excised region of the 3′UTR of the LDLR gene comprises an excision of at least a region spanning from 500, 450, 400, 300, 200 nucleotides (also referred to as “base pairs (bp)”) upstream of the polyadenylation signal to 100, 90, 70, 80, 70, 60 nucleotides upstream of the polyadenylation signal. Each possibility represents a separate embodiment. In some embodiments, the excised region of the LDLR 3′UTR comprises an excision of at least a region spanning from 500 nucleotides upstream of the polyadenylation signal to 60 nucleotides upstream of the polyadenylation signal. In some embodiments, the excised region of the 3′UTR of the LDLR gene comprises an excision of at least a region spanning from 800, 900, 1000, 1100, 1200, 1300, 1400, 1500 nucleotides downstream of the stop codon to 200, 100, 90, 70, 60, 50 nucleotides upstream of the polyadenylation signal. Each possibility represents a separate embodiment. In some embodiments, the excised region of the 3′UTR of the LDLR gene comprises an excision of at least a region spanning from 800 nucleotides downstream of the stop codon to 60 nucleotides upstream of the polyadenylation signal. In some embodiments, the excised region of the 3′UTR of the LDLR gene comprises an excision of at least a region spanning from between 100-300 nucleotides downstream of the stop codon to between 170-30 nucleotides upstream of the polyadenylation signal. In some embodiments, the excised region of the 3′UTR of the LDLR gene comprises an excision of at least a region spanning from 175 nucleotides downstream of the stop codon to 70 nucleotides upstream of the polyadenylation signal. In some embodiments, the excised region of the 3′UTR of the LDLR gene comprises an excision of at least a region spanning from 230 nucleotides downstream of the stop codon to 70 nucleotides upstream of the polyadenylation signal.

[0067] In some embodiments, the method comprises
[0068] introducing to the cell a composition comprising:
   [0069] at least one CRISPR nuclease, or a nucleotide molecule encoding a CRISPR nuclease; and
   [0070] an RNA molecule, or a DNA molecule encoding the RNA molecule, comprising a guide sequence,
   [0071] wherein a complex of the CRISPR nuclease and the RNA molecule affects a double strand break in an allele of the LDLR gene, thereby increasing the expression of the LDLR gene.

[0072] In some embodiments, one or more sites involved in repressing LDLR expression, such as a miRNA binding site or an AU Rich region (AUR), located in the 3′ UTR of LDLR are inactivated, which results in increased expression of LDLR.

[0073] In some embodiments, the composition is introduced to a cell in a subject or to a cell in culture.

[0074] In some embodiments the cell is liver cell. In some embodiments the cell is a hepatocyte. In some embodiments the cell is a stem cell.

[0075] In some embodiments, the CRISPR nuclease and the RNA molecule, or a nucleotide molecule (e.g. a DNA molecule) encoding the RNA molecule, are introduced to the cell at substantially the same time or at different times.

[0076] In some embodiments, a miRNA binding site or AU Rich region (AUR) of the LDLR gene in the cell is subjected to an insertion or deletion mutation. In some embodiments at least one miRNA binding site or AU Rich region (AUR) is excised entirely from one or both LDLR alleles in a cell.

[0077] In some embodiments, the guide sequence portion of the RNA molecule targets a site in the LDLR 3′UTR located downstream to the stop codon or upstream to the polyadenylation signal. In some embodiments, the guide sequence portion of the RNA molecule targets a site in the LDLR 3′UTR located at least 1, 2, 5, 10, 15, 20, 30, 40, 50 nucleotides downstream to the end of the stop codon or at least 1, 2, 5, 10, 15, 20, 25, 30, 40, 50 nucleotides upstream to the polyadenylation signal. Each possibility represents a separate embodiment. In some embodiments, the guide sequence portion of the RNA molecule targets a site in the LDLR 3′UTR located at least 30 nucleotides downstream to the stop codon or at least 30 nucleotides upstream to the polyadenylation signal.

[0078] In some embodiments, the guide sequence portion of the RNA molecule targets a miRNA binding site in a LDLR allele.

[0079] In some embodiments, guide sequence portion of the RNA molecule targets a miR-85 or miR-148 binding site.

[0080] In some embodiments, a miR seed sequence is inactivated as a result of the double strand break in an allele of the LDLR gene.

[0081] In some embodiments, the miR seed sequence is UGGUGCUA or CACUGUG.

[0082] In some embodiments, the miR seed sequence is a miR-185 or miR-148 seed sequence.

[0083] In some embodiments, the complex of the CRISPR nuclease and the RNA molecule affects a double strand break in both alleles of the LDLR gene.

[0084] In some embodiments, the guide sequence portion of the RNA molecule comprises 17-50 contiguous nucleotides containing nucleotides in the sequence set forth in any one of SEQ ID NOs: 1-10736.

[0085] In some embodiments, the composition introduced to the cell further comprises a second RNA molecule, or a nucleotide molecule (e.g. a DNA molecule) encoding the second RNA molecule, comprising a guide sequence portion.

[0086] In some embodiments, a guide sequence portion of the second RNA targets a site in the LDLR 3′UTR located at least 30 nucleotides downstream to the stop codon or at least 30 nucleotides upstream to the polyadenylation signal.

[0087] In some embodiments, the guide sequence portion of the second RNA molecule comprises 17-50 contiguous nucleotides containing nucleotides in the sequence set forth in any one of SEQ ID NOs: 1-10736 other than the sequence of the first RNA molecule.

[0088] In some embodiments, the LDLR 3′UTR or a portion thereof is excised by a double strand break formed by a CRISPR nuclease and the first RNA molecule and a double strand break formed by a CRISPR nuclease and the second RNA molecule. In some embodiments, a sequence comprising at least a portion of the LDLR 3′UTR sequence is excised. In some embodiments, a sequence comprising the LDLR 3′UTR sequence is excised.

[0089] As a non-limiting example, a portion of the LDLR 3′UTR may be excised by the combined activity of a first CRISPR complex comprising an OMNI-50 CRISPR nuclease (SEQ ID NO: 10749) and a first RNA molecule comprising a guide sequence portion that comprises SEQ ID NO: 7707 and a second CRISPR complex comprising an OMNI-50 CRISPR nuclease (SEQ ID NO: 10749) and a second RNA molecule comprising a guide sequence portion that comprises SEQ ID NO: 9843.

[0090] In another non-limiting example, a portion of the LDLR 3′UTR may be excised by the combined activity of a first CRISPR complex comprising an OMNI-79 CRISPR nuclease (SEQ ID NO: 10744) and a first RNA molecule comprising a guide sequence portion that comprises SEQ ID NO: 7871 and a second CRISPR complex comprising an OMNI-79 CRISPR nuclease (SEQ ID NO: 10744) and a second RNA molecule comprising a guide sequence portion that comprises SEQ ID NO: 9843.

[0091] Accordingly, specific guide sequence portions may be used in combination to excise a portion of the LDLR 3′UTR. The following embodiments provide several non-limiting examples of portions of the LDLR 3′ UTR which may be excised in order to increase the expression of the LDLR gene. The indicated genomic locations listed are based on gnomAD v3 database and UCSC Genome Browser assembly ID: hg38, Sequencing/Assembly provider ID: Genome Reference Consortium Human GRCh38.p12 (GCA_000001405.27). Assembly date: December 2013 initial release; December 2017 patch release 12.

[0092] In some embodiments, the excised portion of the LDLR 3′UTR spans from approximately 19:11131463 to 19:11133279. For example, the guide sequence portion of the first RNA molecule may comprise SEQ ID NO: 1120 and the guide sequence portion of the second RNA molecule may comprise SEQ ID NO: 2656 in order to excise such a portion from the LDLR 3′UTR.

[0093] In some embodiments, the excised portion of the LDLR 3′UTR spans from approximately 19:11131463 to 19:11133713. For example, the guide sequence portion of the first RNA molecule may comprise SEQ ID NO: 1120 and the guide sequence portion of the second RNA molecule may comprise SEQ ID NO: 796 in order to excise such a portion from the LDLR 3′UTR.

[0094] In some embodiments, the excised portion of the LDLR 3′UTR spans from approximately 19:11131463 to 19:11132114. For example, the guide sequence portion of the first RNA molecule may comprise SEQ ID NO: 1120 and the guide sequence portion of the second RNA molecule may comprise SEQ ID NO: 477 in order to excise such a portion from the LDLR 3′UTR.

[0095] In some embodiments, the excised portion of the LDLR 3′UTR spans from approximately 19:11131463 to 19:11132115. For example, the guide sequence portion of the first RNA molecule may comprise SEQ ID NO: 1120 and the guide sequence portion of the second RNA molecule may comprise SEQ ID NO: 1913 in order to excise such a portion from the LDLR 3′UTR.

[0096] In some embodiments, the excised portion of the LDLR 3′UTR spans from approximately 19:11131516 to 19:11133713. For example, the guide sequence portion of the first RNA molecule may comprise SEQ ID NO: 181 and the guide sequence portion of the second RNA molecule may comprise SEQ ID NO: 796 in order to excise such a portion from the LDLR 3′UTR.

[0097] In some embodiments, the excised portion of the LDLR 3′UTR spans from approximately 19:11131557 to 19:11131567. For example, the guide sequence portion of the first RNA molecule may comprise SEQ ID NO: 901 and the guide sequence portion of the second RNA molecule may comprise SEQ ID NO: 1927 in order to excise such a portion from the LDLR 3′UTR.

[0098] In some embodiments, the excised portion of the LDLR 3′UTR spans from approximately 19:11133279 to 19:11133713. For example, the guide sequence portion of the first RNA molecule may comprise SEQ ID NO: 2656 and the guide sequence portion of the second RNA molecule may comprise SEQ ID NO: 796 in order to excise such a portion from the LDLR 3′UTR.

[0099] In some embodiments, the excised portion of the LDLR 3′UTR spans from approximately 19:11133713 to 19:11132114. For example, the guide sequence portion of the first RNA molecule may comprise SEQ ID NO: 796 and the guide sequence portion of the second RNA molecule may comprise SEQ ID NO: 477 in order to excise such a portion from the LDLR 3′UTR.

[0100] In some embodiments, the excised portion of the LDLR 3′UTR spans from approximately 19:11133713 to 19:11132115. For example, the guide sequence portion of the first RNA molecule may comprise SEQ ID NO: 796 and the guide sequence portion of the second RNA molecule may comprise SEQ ID NO: 1913 in order to excise such a portion from the LDLR 3′UTR.

[0101] In some embodiments, the excised portion of the LDLR 3′UTR spans from approximately 19:11131467 to 19:11133713. For example, the guide sequence portion of the first RNA molecule may comprise SEQ ID NO: 7871 and the guide sequence portion of the second RNA molecule may comprise SEQ ID NO: 9843 in order to excise such a portion from the LDLR 3′UTR.

[0102] In some embodiments, the excised portion of the LDLR 3′UTR spans from approximately 19:11131519 to 19:11133713. For example, the guide sequence portion of the first RNA molecule may comprise SEQ ID NO: 7707 and the guide sequence portion of the second RNA molecule may comprise SEQ ID NO: 9843 in order to excise such a portion from the LDLR 3′UTR.

[0103] In some embodiments, the endogenous LDLR polyadenylation signal remains intact.

[0104] In some embodiments, the guide sequence portion of the first RNA molecule or second RNA molecule comprises 1, 2, 3, 4, or 5 nucleotide mismatches relative to a fully complementary LDLR target sequence.

[0105] In some embodiments, the guide sequence portion comprises 17-50 contiguous nucleotides containing nucleotides in the sequence set forth in any one of SEQ ID NOs: 1-10736 modified to contain 1, 2, 3, 4, or 5 nucleotide mismatches relative to a fully complementary LDLR target sequence.

[0106] In some embodiments, the guide sequence portion modified to contain 1, 2, 3, 4, or 5 nucleotide mismatches relative to a fully complementary LDLR target sequence provides higher targeting specificity to the complex of the CRISPR nuclease and the first RNA molecule relative to a guide sequence portion that has higher complementarity to the mutant allele of the LDLR gene.

[0107] In some embodiments, the increase of the expression of an endogenous LDLR gene in a cell is measured by an at least 10%, at least 25%, at least 50%, at least 75%, at least 100%, at least 150%, at least 200%, at least 250%, at least 300%, at least 350%, at least 400%, at least 450%, at least 500% increase, at least 550% increase, or at least 600% increase in LDLR transcript levels or LDLR protein levels relative to LDLR transcript levels or LDLR protein levels in the cell prior to modification of the LDLR gene.

[0108] In some embodiments, the increase of the expression of an endogenous LDLR gene results in an at least 10%, at least 25%, at least 50%, at least 75%, at least 100%, at least 150%, at least 200%, at least 250%, at least 300%, at least 350%, at least 400%, at least 450%, or at least 500% increase in LDL-C uptake by the cell relative to the LDL-C uptake by the cell prior to modification of the LDLR gene.

[0109] According to embodiments of the present invention, there is provided a composition comprising an RNA molecule which comprises 17-50 contiguous nucleotides containing nucleotides in the sequence set forth in any one of SEQ ID NOs: 1-10736, or any one of SEQ ID NOs: 1-10736 modified to contain 1, 2, 3, 4, or 5 nucleotide mismatches relative to a fully complementary LDLR target sequence, or a DNA molecule encoding the RNA molecule.

[0110] In some embodiments, the composition further comprises a CRISPR nuclease, or a nucleotide molecule encoding a CRISPR nuclease.

[0111] In some embodiments, the composition further comprises a tracrRNA molecule.

[0112] In some embodiments, the composition further comprises a second RNA molecule, or a DNA molecule encoding the second RNA molecule, comprising a guide sequence portion.

[0113] In some embodiments, a guide sequence portion of the second RNA targets a site in the LDLR 3′UTR located at least 30 nucleotides downstream to the stop codon or at least 30 nucleotides upstream to the polyadenylation signal.

[0114] In some embodiments, the guide sequence portion of the second RNA molecule comprises 17-50 contiguous nucleotides containing nucleotides in the sequence set forth in any one of SEQ ID NOs: 1-10736 other than the sequence of the first RNA molecule, or any one of SEQ ID NOs: 1-10736 other than the sequence of the first RNA molecule modified to contain 1, 2, 3, 4, or 5 nucleotide mismatches relative to a fully complementary LDLR target sequence.

[0115] According to some embodiments of the present invention, there is provided a cell modified according to any one of the methods described herein or modified using any one of the compositions described herein.

[0116] According to some embodiments of the present invention, there is provided a medicament comprising the composition of any one of the embodiments described herein for use in inactivating a LDLR allele in a cell, wherein the medicament is administered by delivering to the cell the composition.

[0117] According to some embodiments of the present invention, there is provided a use of the composition of any one of the embodiments described herein, or a modified cell described herein, for treating, ameliorating, or preventing hypercholesterolemia, comprising delivering the composition or modified cell to a subject experiencing or at risk of experiencing hypercholesterolemia.

[0118] According to some embodiments of the present invention, there is provided a medicament comprising the composition of any one of the embodiments described herein, or a modified cell described herein, for use in treating, ameliorating, or preventing hypercholesterolemia, wherein the medicament is administered by delivering the composition or modified to a subject experiencing or at risk of experiencing hypercholesterolemia.

[0119] According to some embodiments of the present invention, there is provided a kit for increasing LDLR expression in a cell, comprising the composition of any one of the embodiments described herein and instructions for delivering the composition to the cell.

[0120] According to some embodiments of the present invention, there is provided a kit for treating or preventing hypercholesterolemia in a subject, comprising the composition of any one of the embodiments described herein, or a modified cell described herein, and instructions for delivering the composition or modified cell to a subject experiencing or at risk of experiencing hypercholesterolemia.

[0121] According to embodiments of the present invention, there is provided use of any one of the compositions or modified cells described herein for treating, ameliorating, or preventing hypercholesterolemia (e.g., familial hypercholesterolemia), comprising delivering the composition or modified cells to a subject experiencing or at risk of experiencing hypercholesterolemia (e.g., familial hypercholesterolemia).

[0122] According to embodiments of the present invention, there is provided a medicament comprising any one of the compositions or modified cells described herein for treating, ameliorating, or preventing hypercholesterolemia (e.g., familial hypercholesterolemia), such that the medicament is administered by delivering the composition or modified cell to a subject experiencing or at risk of experiencing hypercholesterolemia (e.g., familial hypercholesterolemia).

[0123] According to embodiments of the present invention, there is provided an RNA molecule for use in modifying a cell (e.g. a liver cell or hepatocyte) to treat, ameliorate, or prevent hypercholesterolemia (e.g., familial hypercholesterolemia) in a subject. The RNA molecule may be delivered to the cell ex vivo, in vitro, or in vivo.

[0124] According to embodiments of the present invention, there is provided a kit for inactivating a miRNA binding site and/or AU Rich region (AUR) of a LDLR allele in a cell, comprising any one of the compositions described herein and instructions for delivering the composition to the cell.

[0125] According to embodiments of the present invention, there is provided a kit for treating, ameliorating, or preventing hypercholesterolemia (e.g., familial hypercholesterolemia) in a subject, comprising any one of the compositions described herein and instructions for delivering the composition to a subject experiencing or at risk of experiencing hypercholesterolemia (e.g., familial hypercholesterolemia).

[0126] According to embodiments of the present invention, there is provided a composition comprising an RNA molecule which comprises 17-50 contiguous nucleotides containing nucleotides in the sequence set forth in any one of SEQ ID NOs: 1-10736, or any one of SEQ ID NOs: 1-10736 modified to contain 1, 2, 3, 4, or 5 nucleotide mismatches relative to a fully complementary LDLR target sequence.

[0127] In some embodiments, the composition further comprises a CRISPR nuclease or a functional derivative thereof.

[0128] In some embodiments, the composition further comprises a tracrRNA molecule.

[0129] According to embodiments of the present invention, there is provided a gene editing composition comprising an RNA molecule comprising a guide sequence portion having 17-50 contiguous nucleotides containing nucleotides in the sequence set forth in any one of SEQ ID NOS: 1-10736, or any one of SEQ ID NOs: 1-10736 modified to contain 1, 2, 3, 4, or 5 nucleotide mismatches relative to a fully complementary LDLR target sequence, or a nucleotide molecule (e.g. a DNA molecule) encoding the same. In some embodiments, the RNA molecule further comprises a portion having a sequence which binds to a CRISPR nuclease. In some embodiments, the sequence which binds to a CRISPR nuclease is a tracrRNA sequence.

[0130] In some embodiments, the RNA molecule further comprises a portion having a tracr mate sequence or a molecule encoding the same.

[0131] In some embodiments, the RNA molecule may further comprise one or more linker

[0132] portions.

[0133] According to embodiments of the present invention, an RNA molecule may be up to 1000, 900, 800, 700, 600, 500, 450, 400, 350, 300, 290, 280, 270, 260, 250, 240, 230, 220, 210, 200, 190, 180, 170, 160, 150, 140, 130, 120, 110, or 100 nucleotides in length. Each possibility represents a separate embodiment. In embodiments of the present invention, the RNA molecule may be 17 up to 300 nucleotides in length, 100 up to 300 nucleotides in length, 150 up to 300 nucleotides in length, 100 up to 500 nucleotides in length, 100 up to 400 nucleotides in length, 200 up to 300 nucleotides in length, 100 to 200 nucleotides in length, or 150 up to 250 nucleotides in length. Each possibility represents a separate embodiment.

[0134] According to some embodiments of the present invention, the composition further comprises a tracrRNA molecule.

[0135] In some embodiments, the composition further comprises a second RNA molecule or a DNA molecule encoding the second RNA molecule.

[0136] In some embodiments, a guide sequence portion of the second RNA targets a site in the LDLR 3′UTR located at least 30 nucleotides downstream to the stop codon or at least 30 nucleotides upstream to the polyadenylation signal.

[0137] In some embodiments, the guide sequence portion of the second RNA molecule comprises 17-50 contiguous nucleotides containing nucleotides in the sequence set forth in any one of SEQ ID NOs: 1-10736 other than the sequence of the first RNA molecule, or any one of SEQ ID NOs: 1-10736 other than the sequence of the first RNA molecule modified to contain 1, 2, 3, 4, or 5 nucleotide mismatches relative to a fully complementary LDLR target sequence.

[0138] The compositions and methods of the present disclosure may be utilized for treating, preventing, ameliorating, or slowing progression of hypercholesterolemia.

[0139] Any one of, or combination of, the above-mentioned strategies for increasing LDLR expression or increasing LDLR half-life in a cell may be used in the context of the invention.

[0140] In some embodiments, the method is utilized for treating a subject at risk for hypercholesterolemia, which is a disease phenotype that is decreased in severity by increased expression of the LDLR gene. In such embodiments, the method results in improvement, amelioration, or prevention of the disease phenotype.

[0141] Embodiments of compositions described herein include at least one CRISPR nuclease, RNA molecule(s), and a tracrRNA molecule, being effective in a subject or cells at the same time. The at least one CRISPR nuclease, RNA molecule(s), and tracrRNA may be delivered substantially at the same time or can be delivered at different times but have effect at the same time. For example, this includes delivering the CRISPR nuclease to the subject or cells before the RNA molecule and/or tracrRNA is substantially extant in the subject or cells.

[0142] In some embodiments, a human cell is modified by any one of the methods described herein. In some embodiments, the cell is a liver cell. In some embodiments the cell is a hepatocyte. In some embodiments the cell is a stem cell.

### LDLR Editing Strategies

[0143] Specific regions of the human LDLR gene that are able to be modified or removed in order to increase LDLR expression have not yet been determined. Previously. Knouff et al. (2001) showed a modest increase in hepatic LDLR mRNA levels in the liver of mice heterozygotes which were modified to replace a mouse LDLR allele with a truncated human LDLR minigene variant. Additionally. Bjornsson et al. (2021) identified a single family containing several carriers of a 2.5 kb deletion mutation spanning the distal region of the LDLR 3′UTR, including the endogenous polyadenylation signal, and extending well beyond the LDLR gene, which appeared to provide a gain-of-function effect. However, strategies to target and remove specific portions of the human LDLR 3′UTR, for example, by targeting CRISPR nucleases to specific sites, and the effect of such mutations on LDLR expression and cholesterol levels have been absent.

[0144] The present invention provides methods to increase expression of an LDLR gene, for example, by removing or inactivating regulatory factor sites or excising a portion of the 3′ UTR of one or more LDLR alleles in cells of a subject, thereby treating or preventing hypercholesterolemia (e.g., familial hypercholesterolemia). Accordingly, the provided methods to knockout or inactivate a regulatory factor site within a LDLR allele in a cell may be used to treat, prevent, or ameliorate hypercholesterolemia (e.g., familial hypercholesterolemia). In some embodiments, the regulatory factor site is a miRNA binding site or AU Rich region (AUR).

[0145] LDLR editing strategies include, but are not limited to, utilizing an RNA molecule comprising a guide sequence portion which targets a CRISPR nuclease to a microRNA binding site in the 3′UTR of LDLR. For example, the guide sequence portion may target the miR-185 seed sequence or the miR-148 seed sequence. Editing at such a seed site would eliminate the binding of the miRNAs to the 3′UTR, thus upregulating the LDLR mRNA levels and/or LDLR protein level.

[0146] Another strategy includes utilizing two RNA molecules, each comprising a unique guide sequence portion which targets a CRISPR nuclease to a sequence in the LDLR 3′UTR. To achieve biallelic excision of at least a portion of the 3′UTR, a first of two targeted sequences may be located downstream to the LDLR stop codon and the second of the two sequences may be located upstream to the polyadenylation signal. Such sequences may be located at least 30 nucleotides downstream to the stop codon or at least 30 nucleotides upstream to the polyadenylation signal. In this fashion, biallelic excision of most of the 3′UTR is achieved. Accordingly, miRNA binding sites or AU Rich regions (AURs) regulatory sites that negatively regulate the expression of LDLR are disabled or removed. In some embodiments, this is achieved while maintaining a truncated 3′UTR with an intact polyadenylation signal, which is essential for the stability and translation efficiency of the transcript. In other embodiments, the polyadenylation signal is also at least partially removed.

[0147] Accordingly, one strategy includes utilizing two guide RNA molecules, each comprising a unique guide sequence portion which targets a sequence in the 3′UTR, and at least one CRISPR nuclease to excise a sequence that includes the 3′ UTR of the LDLR gene or at least a portion of the 3′ UTR of the LDLR gene. Such sequences may be located downstream to the polyadenylation signal or upstream to the stop codon. Non-limiting examples of sequences that can be targeted to achieve biallelic excision comprising at least a portion of the 3′UTR or the entire 3′UTR include: 1) a first sequence located upstream to the stop codon and a second sequence located upstream to the polyadenylation signal: 2) a first sequence located downstream to the stop codon and a second sequence located downstream to the polyadenylation signal: and 3) a first sequence located upstream to the stop codon and a second sequence located downstream to the polyadenylation signal.

[0148] Any one of the RNA molecules comprising a guide sequence portion may be a single-guide RNA (sgRNA) molecule or a CRISPR RNA (crRNA) molecule. Typically, a crRNA molecule is utilized with a transactivating crRNA (tracrRNA) molecule to target a CRISPR nuclease, as described in the art. Accordingly, each of the indicated strategies can be performed utilizing one or more CRISPR nucleases with one or more single-guide RNA molecules and/or one or more crRNA and tracrRNA molecules, or any combination thereof. The compositions can be introduced to the target cell as one or more of nucleic acid vectors, DNA molecules, RNA molecules, ribonucleoproteins (RNP), or any combination thereof.

### CRISPR Nucleases and PAM Recognition

[0149] In some embodiments, the sequence specific nuclease is selected from CRISPR nucleases, or is a functional variant thereof. In some embodiments, the sequence specific nuclease is an RNA guided DNA nuclease. In such embodiments, the RNA sequence which guides the RNA guided DNA nuclease (e.g., Cpf1) binds to and/or directs the RNA guided DNA nuclease to all LDLR alleles in a cell. In some embodiments, the CRISPR complex does not further comprise a tracrRNA. A skilled artisan will appreciate that RNA molecules can be engineered to bind to a target of choice in a genome by commonly known methods in the art.

[0150] The term “PAM” as used herein refers to a nucleotide sequence of a target DNA located in proximity to the targeted DNA sequence and recognized by the CRISPR nuclease complex. The PAM sequence may differ depending on the nuclease identity. In addition, there are CRISPR nucleases that can target almost all PAMs. In some embodiments of the present invention, a CRISPR system utilizes one or more RNA molecules having a guide sequence portion to direct a CRISPR nuclease to a target DNA site via Watson-Crick base-pairing between the guide sequence portion and the protospacer on the target DNA site, which is next to the protospacer adjacent motif (PAM), which is an additional requirement for target recognition. The CRISPR nuclease then mediates cleavage of the target DNA site to create a double-stranded break within the protospacer. In a non-limiting example, a type II CRISPR system utilizes a mature crRNA:tracrRNA complex that directs the CRISPR nuclease. e.g. Cas9 to the target DNA the target DNA via Watson-Crick base-pairing between the guide sequence portion of the crRNA and the protospacer on the target DNA next to the protospacer adjacent motif (PAM). A skilled artisan will appreciate that each of the engineered RNA molecule of the present invention is further designed such as to associate with a target genomic DNA sequence of interest next to a protospacer adjacent motif (PAM). e.g., a PAM matching the sequence relevant for the type of CRISPR nuclease utilized, such as for a non-limiting example, NGG or NAG, wherein “N” is any nucleobase, for Streptococcus pyogenes Cas9 WT (SpCAS9); NNGRRT for Staphylococcus aureus (SaCas9); NNNVRYM for Jejuni Cas9 WT; NGAN or NGNG for SpCas9-VQR variant; NGCG for SpCas9-VRER variant; NGAG for SpCas9-EQR variant; NRRH for SpCas9-NRRH variant, wherein N is any nucleobase, R is A or G and H is A, C, or T; NRTH for SpCas9-NRTH variant, wherein N is any nucleobase, R is A or G and H is A, C, or T; NRCH for SpCas9-NRCH variant, wherein N is any nucleobase, R is A or G and H is A, C, or T; NG for SpG variant of SpCas9 wherein N is any nucleobase; NG or NA for SpCas9-NG variant of SpCas9 wherein N is any nucleobase; NR or NRN or NYN for SpRY variant of SpCas9, wherein N is any nucleobase, R is A or G and Y is C or T; NNG for Streptococcus canis Cas9 variant (ScCas9), wherein N is any nucleobase; NNNRRT for SaKKH-Cas9 variant of Staphylococcus aureus (SaCas9), wherein N is any nucleobase, and R is A or G; NNNNGATT for Neisseria meningitidis (NmCas9), wherein N is any nucleobase; TTN for Alicyclobacillus acidiphilus Cas12b (AacCas12b), wherein N is any nucleobase; or TTTV for Cpf1, wherein V is A, C or G. RNA molecules of the present invention are each designed to form complexes in conjunction with one or more different CRISPR nucleases and designed to target polynucleotide sequences of interest utilizing one or more different PAM sequences respective to the CRISPR nuclease utilized.

[0151] In some embodiments, an RNA-guided DNA nuclease e.g., a CRISPR nuclease, may be used to cause a DNA break, either double or single-stranded in nature, at a desired location in the genome of a cell. The most commonly used RNA-guided DNA nucleases are derived from CRISPR systems, however, other RNA-guided DNA nucleases are also contemplated for use in the genome editing compositions and methods described herein. For instance, see U.S. Patent Publication No. 2015/0211023, incorporated herein by reference.

[0152] CRISPR systems that may be used in the practice of the invention vary greatly. CRISPR systems can be a type I, a type II, or a type III system. Non- limiting examples of suitable CRISPR proteins include Cas3, Cas4, Cas5, Cas5e (or CasD), Cas6, Cas6e, Cas6f, Cas7, Cas8al, Cas8a2, Cas8b, Cas8c, Cas9, Casl0,Casl Od, CasF, CasG, CasH, Csyl , Csy2, Csy3, Csel (or CasA), Cse2 (or CasB), Cse3 (or CasE), Cse4 (or CasC), Cscl, Csc2, Csa5, Csn2, Csm2, Csm3, Csm4, Csm5, Csm6, Cmrl, Cmr3, Cmr4, Cmr5, Cmr6, Csbl, Csb2, Csb3, Csxl7, Csxl4, Csxl0, Csxl6, CsaX, Csx3, Cszl, Csxl5,Csfl, Csf2, Csf3, Csf4, and Cul966.

[0153] In some embodiments, the RNA-guided DNA nuclease is a CRISPR nuclease derived from a type II CRISPR system (e.g., Cas9). The CRISPR nuclease may be derived from Streptococcus pyogenes, Streptococcus thermophilus, Streptococcus sp., Staphylococcus aureus, Neisseria meningitidis, Treponema denticola, Nocardiopsis Streptomyces pristinaespiralis, Streptomyces viridochromogenes, Streptomyces viridochromogenes, Streptosporangium roseum, Streptosporangium roseum, Alicyclobacillus acidocaldarius, Bacillus pseudomycoides, Bacillus selenitireducens, Exiguobacterium sibiricum, Lactobacillus delbrueckii, Lactobacillus salivarius, Microscilla marina, Burkholderiales bacterium, Polaromonas naphthalenivorans, Polaromonas sp., Crocosphaera watsonii, Cyanothece sp., Microcystis aeruginosa, Synechococcus sp., Acetohalobium arabaticum, Ammonifex degensii, Caldicelulosiruptor becscii, Candidatus Desulforudis, Clostridium botulinum, Clostridium difficile, Finegoldia magna, Natranaerobius thermophilus, Pelotomaculumthermopropionicum, Acidithiobacillus caldus, Acidithiobacillus ferrooxidans, Allochromatium vinosum, Marinobacter sp., Nitrosococcus halophilus, Nitrosococcus watsoni, Pseudoalteromonas haloplanktis, Ktedonobacter racemifer, Methanohalobium evestigatum, Anabaena variabilis, Nodularia spumigena, Nostoc sp., Arthrospira maxima, Arthrospira platensis, Arthrospira sp., Lyngbya sp., Microcoleus chthonoplastes, Oscillatoria sp., Petrotoga mobilis, Thermosipho africanus, Acaryochloris marina, or any species which encodes a CRISPR nuclease with a known PAM sequence. CRISPR nucleases encoded by uncultured bacteria may also be used in the context of the invention. (See Burstein et al. Nature, 2017). Variants of CRIPSR proteins having known PAM sequences e.g., SpCas9 D1135E variant, SpCas9 VQR variant, SpCas9 EQR variant, or SpCas9 VRER variant may also be used in the context of the invention.

[0154] Thus, an RNA guided DNA nuclease of a CRISPR system, such as a Cas9 protein or modified Cas9 or homolog or ortholog of Cas9, or other RNA guided DNA nucleases belonging to other types of CRISPR systems, such as Cpf1 and its homologs and orthologs, may be used in the compositions of the present invention. Additional CRISPR nucleases may also be used, for example, the nucleases described in PCT International Application Publication Nos. WO2020/223514 and WO2020/223553, which are hereby incorporated by reference.

[0155] In certain embodiments, the CRIPSR nuclease may be a “functional derivative” of a naturally occurring Cas protein. A “functional derivative” of a native sequence polypeptide is a compound having a qualitative biological property in common with a native sequence polypeptide. “Functional derivatives” include, but are not limited to, fragments of a native sequence and derivatives of a native sequence polypeptide and its fragments, provided that they have a biological activity in common with a corresponding native sequence polypeptide. A biological activity contemplated herein is the ability of the functional derivative to hydrolyze a DNA substrate into fragments. The term “derivative” encompasses both amino acid sequence variants of polypeptide, covalent modifications, and fusions thereof. Suitable derivatives of a Cas polypeptide or a fragment thereof include but are not limited to mutants, fusions, covalent modifications of Cas protein or a fragment thereof. Derivatives include, but are not limited to, CRISPR nickases, catalytically inactive or “dead” CRISPR nucleases, and fusion of a CRISPR nuclease or derivative thereof to other enzymes such as base editors or retrotransposons. See for example, Anzalone et al. (2019) and PCT International Application No. PCT/US2020/037560.

[0156] Cas protein, which includes Cas protein or a fragment thereof, as well as derivatives of Cas protein or a fragment thereof, may be obtainable from a cell or synthesized chemically or by a combination of these two procedures. The cell may be a cell that naturally produces Cas protein, or a cell that naturally produces Cas protein and is genetically engineered to produce the endogenous Cas protein at a higher expression level or to produce a Cas protein from an exogenously introduced nucleic acid, which nucleic acid encodes a Cas that is same or different from the endogenous Cas. In some cases, the cell does not naturally produce Cas protein and is genetically engineered to produce a Cas protein.

[0157] In some embodiments, the CRISPR nuclease is Cpf1. Cpf1 is a single RNA-guided endonuclease which utilizes a T-rich protospacer-adjacent motif. Cpf1 cleaves DNA via a staggered DNA double-stranded break. Two Cpf1 enzymes from Acidaminococcus and Lachnospiraceae have been shown to carry out efficient genome-editing activity in human cells. (See Zetsche et al., 2015).

[0158] Thus, an RNA guided DNA nuclease of a Type II CRISPR System, such as a Cas9 protein or modified Cas9 or homologs, orthologues, or variants of Cas9, or other RNA guided DNA nucleases belonging to other types of CRISPR systems, such as Cpf1 and its homologs, orthologues, or variants, may be used in the present invention.

[0159] In some embodiments, the guide molecule comprises one or more chemical modifications which imparts a new or improved property (e.g., improved stability from degradation, improved hybridization energetics, or improved binding properties with an RNA guided DNA nuclease). Suitable chemical modifications include, but are not limited to: modified bases, modified sugar moieties, or modified inter-nucleoside linkages. Non-limiting examples of suitable chemical modifications include: 4-acetylcytidine, 5-(carboxyhydroxymethyl)uridine, 2′-O-methylcytidine, 5-carboxymethylaminomethyl-2-thiouridine, S-carboxymethylaminomethyluridine, dihydrouridine, 2′-O-methylpseudouridine, “beta, D-galactosylqueuosine”, 2′-O-methylguanosine, inosine, N6-isopentenyladenosine, 1-methyladenosine, 1-methylpseudouridine, 1-methylguanosine, 1-methylinosine, “2,2-dimethylguanosine”, 2-methyladenosine, 2-methylguanosine, 3-methylcytidine, 5-methylcytidine, N6-methyladenosine, 7-methylguanosine, 5-methylaminomethyluridine, 5-methoxyaminomethyl-2-thiouridine, “beta, D-mannosylqueuosine”, 5-methoxycarbonylmethyl-2-thiouridine, 5-methoxycarbonyImethyluridine, 5-methoxyuridine, 2-methylthio-N6-isopentenyladenosine, N-((9-beta-D-ribofuranosyl-2-methylthiopurine-6-yl)carbamoyl)threonine, N-((9-beta-D-ribofuranosylpurine-6-yl)N-methylcarbamoyl)threonine, uridine-S-oxyacetic acid-methylester, uridine-5-oxyacetic acid, wybutoxosine, queuosine, 2-thiocytidine, 5-methyl-2-thiouridine, 2-thiouridine, 4-thiouridine, 5-methyluridine, N-((9-beta-D-ribofuranosylpurine-6-yl)-carbamoyl)threonine, 2′-O-methyl-5-methyluridine, 2″-O-methyluridine, wybutosine, “3-(3-amino-3-carboxy-propyl)uridine, (acp3)u”, 2′-0-methyl (M), 3′-phosphorothioate (MS), 3′-thioPACE (MSP), pseudouridine, or 1-methyl pseudo-uridine. Each possibility represents a separate embodiment of the present invention.

[0160] In addition to targeting LDLR alleles by a RNA-guided CRISPR nuclease, other means of inhibiting LDLR expression in a target cell include but are not limited to use of a gapmer, shRNA, siRNA, a customized TALEN, meganuclease, or zinc finger nuclease, a small molecule inhibitor, and any other method known in the art for reducing or eliminating expression of a gene in a target cell. See, for example, U.S. Pat. Nos. 6,506,559; 7,560,438; 8,420,391; 8,552,171; 7,056,704; 7,078,196; 8,362,231; 8,372,968; 9,045,754; and PCT International Publication Nos. WO/2004/067736; WO/2006/097853; WO/2003/087341; WO/2000/0415661; WO/2003/080809; WO/2010/079430; WO/2010/079430; WO/2011/072246; WO/2018/057989; and WO/2017/164230, the entire contents of each of which are incorporated herein by reference.

[0161] Advantageously, the guide RNA molecules presented herein provide improved efficiency when complexed with a CRISPR nuclease in a cell relative to other guide RNA molecules. These specifically designed sequences may also be useful for identifying LDLR target sites for other nucleotide targeting-based gene-editing or gene-silencing methods, for example, siRNA, TALENS, meganucleases or zinc-finger nucleases.

### Delivery to Cells

[0162] Any one of the compositions described herein may be delivered to a target cell by any suitable means. RNA molecule compositions of the present invention may be targeted to any cell which contains and/or expresses a LDLR allele, such as a mammalian liver cell, hepatocyte, or stem cell. For example, in one embodiment the RNA molecule specifically targets LDLR alleles in a target cell and the target cell is a liver cell, hepatocyte, or stem cell. The delivery to the cell may be performed in vivo, ex vivo, or in vitro. The delivery may be in vivo delivery of a composition packaged in a lentivirus, adeno-associated virus (AAV), or nanoparticle to the liver of a subject, or a liver cell of the subject. The delivery may be ex vivo to a cell of the subject, for example, a liver cell, hepatocyte, or stem cell isolated from the subject. Further, the nucleic acid compositions described herein may be delivered to a cell as one or more of DNA molecules, RNA molecules, ribonucleoproteins (RNP), nucleic acid vectors, or any combination thereof.

[0163] In some embodiments, in vivo delivery methods of the compositions described herein include delivery by a lentivirus, adeno-associated virus (AAV) or nanoparticle. In some embodiments, in vivo delivery methods of the compositions described herein include delivery by a lentivirus, adeno-associated virus (AAV), naked RNA, or nanoparticle, such as a lipid nanoparticle. The composition may be in the form of an RNA composition. The composition may be in the form of a ribonucleoprotein (RNP) composition. Accordingly, the delivery can be performed in vivo to liver cells within a subject, for example, a subject suffering from hypercholesterolemia.

[0164] In some embodiments, any one of the compositions described herein is delivered to a cell ex-vivo. In some embodiments, the cell is a stem cell. In some embodiments, the cell is a liver cell. In some embodiments, the cell is a hepatocyte. In some embodiments, the cell is an iPS-derived hepatocyte. The composition may be delivered to the cell by any known ex-vivo delivery method, including but not limited to, electroporation, viral transduction, nanoparticle delivery, liposomes, etc. The composition may be in the form of an RNP composition. Additional detailed delivery methods are described throughout this section.

[0165] In some embodiments, option a liver lobe or hepatocyte cells are obtained from a subject, for example, by performing a biopsy. The obtained cells may then be genetically modified by ex vivo delivery of a composition described herein. The modified cells may be re-introduced to the subject by performing a lobe transplantation or hepatocyte transplantation.

[0166] In some embodiments, the RNA molecule comprises a chemical modification. Non-limiting examples of suitable chemical modifications include 2′-0-methyl (M), 2′-0-methyl, 3′phosphorothioate (MS) or 2′-0-methyl, 3′thioPACE (MSP), pseudouridine, and 1-methyl pseudo-uridine. Each possibility represents a separate embodiment of the present invention.

[0167] Any suitable viral vector system may be used to deliver nucleic acid compositions e.g., the RNA molecule compositions of the subject invention. Conventional viral and non-viral based gene transfer methods can be used to introduce nucleic acids and target tissues. In certain embodiments, nucleic acids are administered for in vivo or ex vivo gene therapy uses. Non-viral vector delivery systems include naked nucleic acid, and nucleic acid complexed with a delivery vehicle such as a liposome or poloxamer. For a review of gene therapy procedures, see Anderson (1992); Nabel & Felgner (1993); Mitani & Caskey (1993); Dillon (1993); Miller (1992); Van Brunt (1988); Vigne (1995); Kremer & Perricaudet (1995); Haddada et al. (1995); and Yu et al. (1994).

[0168] Methods of non-viral delivery of nucleic acids and/or proteins include electroporation, lipofection, microinjection, biolistics, particle gun acceleration, virosomes, liposomes, immunoliposomes, lipid nanoparticles (LNPs), polycation or lipid:nucleic acid conjugates, artificial virions, and agent-enhanced uptake of nucleic acids or can be delivered to plant cells by bacteria or viruses (e.g., Agrobacterium, Rhizobium sp. NGR234, Sinorhizoboiummeliloti, Mesorhizobium loti, tobacco mosaic virus, potato virus X, cauliflower mosaic virus and cassava vein mosaic virus). (See, e.g., Chung et al., 2006). Sonoporation using, e.g., the Sonitron 2000 system (Rich-Mar), can also be used for delivery of nucleic acids. Cationic-lipid mediated delivery of proteins and/or nucleic acids is also contemplated as an in vivo, ex vivo, or in vitro delivery method. (See Zuris et al. (2015); see also Coelho et al. (2013); Judge et al. (2006); and Basha et al. (2011)).

[0169] Non-viral vectors, such as transposon-based systems e.g. recombinant Sleeping Beauty transposon systems or recombinant Piggy Bac transposon systems, may also be delivered to a target cell and utilized for transposition of a polynucleotide sequence of a molecule of the composition or a polynucleotide sequence encoding a molecule of the composition in the target cell.

[0170] Additional exemplary nucleic acid delivery systems include those provided by Amaxa.RTM. Biosystems (Cologne, Germany), Maxcyte, Inc. (Rockville, Md.), BTX Molecular Delivery Systems (Holliston, Mass.) and Copernicus Therapeutics Inc., (see, e.g., U.S. Pat. No. 6,008,336). Lipofection is described in e.g., U.S. Pat. Nos. 5,049,386, 4,946,787; and 4,897,355, and lipofection reagents are sold commercially (e.g., Transfectam.™, Lipofectin.™. and Lipofectamine.™. RNAiMAX). Cationic and neutral lipids that are suitable for efficient receptor-recognition lipofection of polynucleotides include those disclosed in PCT International Publication Nos. WO/1991/017424 and WO/1991/016024. Delivery can be to cells (ex vivo administration) or target tissues (in vivo administration).

[0171] The preparation of lipid:nucleic acid complexes, including targeted liposomes such as immunolipid complexes, is well known to one of skill in the art (see, e.g., Crystal, Science (1995); Blaese et al., (1995); Behr et al., (1994); Remy et al. (1994); Gao and Huang (1995); Ahmad and Allen (1992); U.S. Pat. Nos. 4,186,183; 4,217,344; 4,235,871; 4,261,975; 4,485,054; 4,501,728; 4,774,085; 4,837,028; and 4,946,787).

[0172] Additional methods of delivery include the use of packaging the nucleic acids to be delivered into EnGeneIC delivery vehicles (EDVs). These EDVs are specifically delivered to target tissues using bispecific antibodies where one arm of the antibody has specificity for the target tissue and the other has specificity for the EDV. The antibody brings the EDVs to the target cell surface and then the EDV is brought into the cell by endocytosis. Once in the cell, the contents are released (See MacDiarmid et al., 2009).

[0173] The use of RNA or DNA viral based systems for viral mediated delivery of nucleic acids take advantage of highly evolved processes for targeting a virus to specific cells in the body and trafficking the viral payload to the nucleus. Viral vectors can be administered directly to patients (in vivo) or they can be used to treat cells in vitro and the modified cells are administered to patients (ex vivo). Conventional viral based systems for the delivery of nucleic acids include, but are not limited to, retroviral, lentivirus, adenoviral, adeno-associated, vaccinia and herpes simplex virus vectors for gene transfer.

[0174] The tropism of a retrovirus can be altered by incorporating foreign envelope proteins, expanding the potential target population of target cells. Lentiviral vectors are retroviral vectors that are able to transduce or infect non-dividing cells and typically produce high viral titers. Selection of a retroviral gene transfer system depends on the target tissue. Retroviral vectors are comprised of cis-acting long terminal repeats with packaging capacity for up to 6-10 kb of foreign sequence. The minimum cis-acting LTRs are sufficient for replication and packaging of the vectors, which are then used to integrate the therapeutic gene into the target cell to provide permanent transgene expression. Widely used retroviral vectors include those based upon murine leukemia virus (MuLV), gibbon ape leukemia virus (GaLV), Simian Immunodeficiency virus (SIV), human immunodeficiency virus (HIV), and combinations thereof (See, e.g., Buchschacher et al. (1992); Johann et al. (1992); Sommerfelt et al. (1990); Wilson et al. (1989); Miller et al. (1991); PCT International Publication No. WO/1994/026877A1).

[0175] At least six viral vector approaches are currently available for gene transfer in clinical trials, which utilize approaches that involve complementation of defective vectors by genes inserted into helper cell lines to generate the transducing agent.

[0176] pLASN and MFG-S are examples of retroviral vectors that have been used in clinical trials (See Dunbar et al., 1995; Kohn et al., 1995; Malech et al., 1997). PA317/pLASN was the first therapeutic vector used in a gene therapy trial (Blaese et al., 1995). Transduction efficiencies of 50% or greater have been observed for MFG-S packaged vectors. (Ellem et al., (1997); Dranoff et al., 1997).

[0177] Packaging cells are used to form virus particles that are capable of infecting a host cell. Such cells include 293 cells, which package adenovirus, AAV, and Psi-2 cells or PA317 cells, which package retrovirus. Viral vectors used in gene therapy are usually generated by a producer cell line that packages a nucleic acid vector into a viral particle. The vectors typically contain the minimal viral sequences required for packaging and subsequent integration into a host (if applicable), other viral sequences being replaced by an expression cassette encoding the protein to be expressed. The missing viral functions are supplied in trans by the packaging cell line. For example, AAV vectors used in gene therapy typically only possess inverted terminal repeat (ITR) sequences from the AAV genome which are required for packaging and integration into the host genome. Viral DNA is packaged in a cell line, which contains a helper plasmid encoding the other AAV genes, namely rep and cap, but lacking ITR sequences. The cell line is also infected with adenovirus as a helper. The helper virus promotes replication of the AAV vector and expression of AAV genes from the helper plasmid. The helper plasmid is not packaged in significant amounts due to a lack of ITR sequences. Contamination with adenovirus can be reduced by, e.g., heat treatment to which adenovirus is more sensitive than AAV. Additionally, AAV can be produced at clinical scale using baculovirus systems (see U.S. Pat. No. 7,479,554).

[0178] In many gene therapy applications, it is desirable that the gene therapy vector be delivered with a high degree of specificity to a particular tissue type. Accordingly, a viral vector can be modified to have specificity for a given cell type by expressing a ligand as a fusion protein with a viral coat protein on the outer surface of the virus. The ligand is chosen to have affinity for a receptor known to be present on the cell type of interest. For example, Han et al. (1995) reported that Moloney murine leukemia virus can be modified to express human heregulin fused to gp70, and the recombinant virus infects certain human breast cancer cells expressing human epidermal growth factor receptor. This principle can be extended to other virus-target cell pairs, in which the target cell expresses a receptor and the virus expresses a fusion protein comprising a ligand for the cell-surface receptor. For example, filamentous phage can be engineered to display antibody fragments (e.g., FAB or Fv) having specific binding affinity for virtually any chosen cellular receptor. Although the above description applies primarily to viral vectors, the same principles can be applied to nonviral vectors. Such vectors can be engineered to contain specific uptake sequences which favor uptake by specific target cells.

[0179] Gene therapy vectors can be delivered in vivo by administration to an individual patient, for example by systemic administration (e.g., intravitreal, intravenous, intraperitoneal, intramuscular, subdermal, or intracranial infusion) or topical application.

[0180] Alternatively, vectors can be delivered to cells ex vivo, such as cells explanted from an individual patient (e.g., lymphocytes, bone marrow aspirates, tissue biopsy) or universal donor hematopoietic stem cells, followed by reimplantation of the cells into a patient, optionally after selection for cells which have incorporated the vector. A non-limiting exemplary ex vivo approach may involve removal of tissue (e.g., peripheral blood, bone marrow, and spleen) from a patient for culture, nucleic acid transfer to the cultured cells (e.g., hematopoietic stem cells), followed by grafting the cells to a target tissue (e.g., bone marrow, and spleen) of the patient. In some embodiments, the stem cell or hematopoietic stem cell may be further treated with a viability enhancer.

[0181] Ex vivo cell transfection for diagnostics, research, or for gene therapy (e.g., via re-infusion of the transfected cells into the host organism) is well known to those of skill in the art. In a preferred embodiment, cells are isolated from the subject organism, transfected with a nucleic acid composition, and re-infused back into the subject organism (e.g., patient). Various cell types suitable for ex vivo transfection are well known to those of skill in the art (See, e.g., Freshney, “Culture of Animal Cells, A Manual of Basic Technique and Specialized Applications (6th edition, 2010) and the references cited therein for a discussion of how to isolate and culture cells from patients).

[0182] Vectors (e.g., retroviruses, liposomes, etc.) containing therapeutic nucleic acid compositions can also be administered directly to an organism for transduction of cells in vivo. Administration is by any of the routes normally used for introducing a molecule into ultimate contact with blood or tissue cells including, but not limited to, injection, infusion, topical application (e.g., eye drops and cream) and electroporation. Suitable methods of administering such nucleic acids are available and well known to those of skill in the art, and, although more than one route can be used to administer a particular composition, a particular route can often provide a more immediate and more effective reaction than another route. According to some embodiments, the composition is delivered via IV injection.

[0183] Vectors suitable for introduction of transgenes into immune cells (e.g., T-cells) include non-integrating lentivirus vectors. See, e.g., U.S. Patent Publication No. 2009/0117617.

[0184] Pharmaceutically acceptable carriers are determined in part by the particular composition being administered, as well as by the particular method used to administer the composition. Accordingly, there is a wide variety of suitable formulations of pharmaceutical compositions available, as described below (See, e.g., Remington's Pharmaceutical Sciences, 17th ed., 1989).

### Examples of RNA Guide Sequences Which Specifically Target Alleles of LDLR Gene

[0185] Although a large number of guide sequences can be designed to target the LDLR gene, the nucleotide sequences described in Table 1 and are identified by SEQ ID NOs: 1-10736 were specifically selected to effectively implement the methods set forth herein.

[0186] Table 1 shows guide sequences designed for use as described in the embodiments above to associate with LDLR alleles. Each engineered guide molecule is further designed such as to associate with a target genomic DNA sequence of interest that lies next to a protospacer adjacent motif (PAM), e.g., a PAM matching the sequence NGG or NAG, where “N” is any nucleobase. The guide sequences were designed to work in conjunction with one or more different CRISPR nucleases, including, but not limited to, e.g. SpCas9WT (PAM SEQ: NGG), SpCas9. VQR.1 (PAM SEQ: NGAN), SpCas9.VQR.2 (PAM SEQ: NGNG), SpCas9.EQR (PAM SEQ: NGAG), SpCas9.VRER (PAM SEQ: NGCG), SaCas9WT (PAM SEQ: NNGRRT), SpRY (PAM SEQ: NRN or NYN), NmCas9WT (PAM SEQ: NNNNGATT), Cpf1 (PAM SEQ: TTTV), or JeCas9WT (PAM SEQ: NNNVRYM). RNA molecules of the present invention are each designed to form complexes in conjunction with one or more different CRISPR nucleases and designed to target polynucleotide sequences of interest utilizing one or more different PAM sequences respective to the CRISPR nuclease utilized.

TABLE 1
Guide sequences designed to
associate with specific LDLR gene targets

| | SEQ ID | SEQ ID | SEQ ID |
|---|---|---|---|
| | NOS: | NOs: | NOS: |
| | of 20 base | of 21 base | of 22 base |
| Target | guides | guides | guides |
| 19:11131280-19:11133820 | 1-3564 | 3565-7118 | 7119-10735 |
| LDLR 3'UTR, including | | | |
| 30 nt from the stop | | | |
| codon and 30 nt upstream | | | |
| to the polyadenylation site | | | |

The indicated locations listed in column 1 of the Table 1 are based on gnomAD v3 database and UCSC Genome Browser assembly ID: hg38, Sequencing/Assembly provider ID: Genome Reference Consortium Human GRCh38.p12 (GCA_000001405.27). Assembly date: December 2013 initial release; December 2017 patch release 12.

[0187] Examples are provided below to facilitate a more complete understanding of the invention. The following examples illustrate the exemplary modes of making and practicing the invention. However, the scope of the invention is not limited to specific embodiments disclosed in these Examples, which are for purposes of illustration only.

### EXPERIMENTAL DETAILS

### Example 1: General LDLR Modification Anaylsis

[0188] Guide sequences comprising 17-50 contiguous nucleotides containing nucleotides in the sequence set forth in any one of SEQ ID NOs: 1-10736 are screened for high on target activity using SpCas9 in human cells. On target activity is determined by DNA capillary electrophoresis analysis.

### Example 2: LDLR 3′ UTR Modification Proof of Concept

[0189] Familial hypercholesterolemia (FH), which is characterized by lifelong elevation of LDL-C, is caused by pathogenic mutations in the LDLR gene in 85-90% of cases (L. Jiang et al, 2015; A. K. Soutar and R. P. Naoumova, 2007).

[0190] The data presented in this example demonstrates that deletion of the 3′UTR region of the LDLR gene (FIG. 1A) increased the expression of the LDLR gene product both at the RNA and protein levels and increases cholesterol uptake in vitro (FIG. 1B, FIG. 1C, and FIG. 1D). The cellular intake kinetics of fluorescently labeled LDL-cholesterol was measured using flow cytometry in wild-type and 3′UTR-excised HepG2 cells. A two-fold increase in the uptake of cholesterol was observed following 3′ UTR excision at all the time points tested (FIG. 1E). See also FIGS. 1F-1H, FIGS. 7A-7C, FIGS. 8A-8D, and FIGS. 9A-9D.

[0191] An ex vivo proof of concept for a LDLR 3′UTR excision strategy was established in FH patient-derived LCL cells, which are EBV-transformed lymphoblastoid B-cell lines. These cells have several advantages in their use as a disease model, such as ease of derivation, facile growth, and genomic stability. The abundance and functionality of LDLR in these cells has also been demonstrated (P. C. Chan et al. 1997).

[0192] Two cell lines representing FH heterozygous individuals were characterized. The first cell line, GM1448, harbors a ΔG197 mutation, which according to ClinVarMiner is known to be a founder mutation in the Lithuanian Ashkenazi Jewish population and has been observed in 35% of 71 Ashkenazi Jewish families affected by FH. Functional studies have shown that this variant causes defective protein transport to the Golgi complex and the mutant protein shows <2% LDLR activity in cells from a homozygous individual. The second cell line, GM1460, has a missense mutation at C646Y resulting from a 2000G>A substitution. According to ClinVarMiner, this mutation causes reduced processing of LDLR leading to approximately 20% of the receptors being processed to a mature form in homozygous individuals (FIGS. 2A-2D).

[0193] Excision of the LDLR 3′UTR by SpCas9 and specific guide RNA molecules in FH patient LCL cells caused an upregulation of LDLR mRNA, LDLR surface protein, and cholesterol uptake compared to non-treated cells (FIGS. 3A-3D).

[0194] For an animal model selection as an in vivo proof of concept, a 3′UTR excision strategy was validated in mice Hepal-6 hepatocyte cells. Excision of the 3′UTR of the mouse LDLR gene using a mouse editing composition resulted in upregulation of surface LDLR and increases in cholesterol uptake (FIGS. 4A-4C).

[0195] Editing compositions using alternative CRISPR nucleases were also validated for use in LDLR editing. Guide RNA molecules that alter the 3′UTR of LDLR were screened with (1) an OMNI-50 CRISPR nuclease, which is described in PCT International Application Publication No. WO/2020/223513, the content of which is hereby incorporated by reference, (2) an OMNI-79 CRISPR nuclease, which is described in PCT International Application Publication No. WO/2021/248016, the content of which is hereby incorporated by reference, (3) an enhanced activity variant of the OMNI-79 CRISPR nuclease referred to as OMNI-79 V5570, and (4) an OMNI-103 CRISPR nuclease using a DNA transfection method in HeLa cells (FIGS. 5A-5C). It was found that OMNI-79 V5570 improves the editing levels for majority of the sgRNAs tested. Several highly active guides were identified for all tested nucleases tested.

TABLE 2
Alternative OMNI CRISPR nucleases, PAM requirements, and sgRNA
scaffold sequences

| OMNI CRISPR | PAM | |
|---|---|---|
| Nuclease and gRNA | Sequence | sgRNA Scaffold Sequence |
| OMNI-50 | NGG | GUUUGAGAGUUAUGUAAGAAAUUACAUGACGAGUUC |
| (SEQ ID NO: 10749) | | AAAUAAAAAUUUAUUCAAACCGCCUAUUUAUAGGCCG |
| | | CAGAUGUUCUGCAUUAUGCUUGCUAUUGCAAGCUUUU |
| | | UU (SEQ ID NO: 10750) |
| OMNI-79 | NGR | GUUGCCGCUGGAGAAAUCCAGUUGUUAACAAGC |
| (SEQ ID NO: 10744) | | AGCUUGACUGCACCAAAUAAGGCGGGGGCUGCG |
| | | GCCCUCGCUUUUUU (SEQ ID NO: 10747) |
| OMNI-79 V5570 | NGR | GUUGCCGCUGGAGAAAUCCAGUUGUUAACAAGC |
| (SEQ ID NO: 10745) | | AGCUUGACUGCACCAAAUAAGGCGGGGGCUGCG |
| | | GCCCUCGCUUUUUU (SEQ ID NO: 10747) |
| OMNI-103 | NNRACT | GUUUGAGAGUAGUGUAAGAAAUUACACUACAAG |
| (SEQ ID NO: 10746) | | UUCAAAUAAAAAUUUAUUCAAAUCCAUUUGCUA |
| | | CAUUGUGUAGAAUUUAAAGAUCUGGCAACAGAU |
| | | CUUUUUUU (SEQ ID NO: 10748) |

TABLE 3
LDLR-targeting guide sequence portions and CRISPR nucleases utilized

| | | | | | Distance from |
|---|---|---|---|---|---|
| | | | | Human | stop codon/ |
| Nuclease | Guide | | | Genomic | or polyA |
| Utilized | Name | Guide Sequence Portion | PAM | Location | signal (bp) |
| OMNI-79 | sgRNA35 | GGACAGUGCCCAUGCAAU | TGGGTT | 19:11131462 | 170 from stop |
| V5570 or | (g35) | GGCU (SEQ ID NO: 9375) | | | codon |
| OMNI-50 | | | | | |
| OMNI-79 | sgRNA38 | AUCCCAACCCAAGCCAUU | GGGCAC | 19:11131467 | 153 from stop |
| V5570 or | (g38) | GCAU (SEQ ID NO: 7871) | | | codon |
| OMNI-50 | | | | | |
| OMNI-79 | sgRNA40 | AAUCCCAACCCAAGCCAU | TGGGCA | 19:11131468 | 154 from stop |
| V5570 or | (g40) | UGCA (SEQ ID NO: 7340) | | | codon |
| OMNI-50 | | | | | |
| OMNI-79 | sgRNA44 | CCUGUUUCUCUUAUCCUU | AGGAAA | 19:11131508 | 194 from stop |
| V5570 or | (g44) | CACG (SEQ ID NO: 8585) | | | codon |
| OMNI-50 | | | | | |
| OMNI-79 or | sgRNA46 | AGGAUAAGAGAAACAGG | GGGGAC | 19:11131519 | 227 from stop |
| OMNI-50 | (g46) | CCCGG (SEQ ID NO: 7707) | | | codon |
| OMNI-79 | sgRNA47 | GGAUAAGAGAAACAGGC | GGGACC | 19:11131520 | 228 from stop |
| V5570 or | (g47) | CCGGG (SEQ ID NO: 9409) | | | codon |
| OMNI-50 | | | | | |
| OMNI-79 | sgRNA48 | GAUGACACCUCCAUUUCU | AGGAAG | 19:11131550 | 261 from stop |
| V5570 or | (g48) | CUCC (SEQ ID NO: 9133) | | | codon |
| OMNI-50 | | | | | |
| OMNI-79 | sgRNA49 | AAAACUUCCUGGAGAGA | AGGTGT | 19:11131554 | 243 from stop |
| V5570 or | (g49) | AAUGG (SEQ ID NO: 7134) | | | codon |
| OMNI-50 | | | | | |
| OMNI-79 | sgRNA50 | CUCAAAACUUCCUGGAGA | TGGAGG | 19:11131557 | 246 from stop |
| V5570 or | (g50) | GAAA (SEQ ID NO: 8725) | | | codon |
| OMNI-50 | | | | | |
| OMNI-79 | sgRNA52 | AUGUUUGAGGAUUGUGU | TGGAGA | 19:11131589 | 278 from stop |
| V5570 or | (g52) | CACGG (SEQ ID NO: 7963) | | | codon |
| OMNI-50 | | | | | |
| OMNI-79 or | sgRNA53 | UCCAUGUUUGAGGAUUG | CGGTGG | 19:11131592 | 281 from stop |
| OMNI-50 | (g53) | UGUCA (SEQ ID NO: 10059) | | | codon |
| OMNI-79 | sgRNA56 | UUUUCUGUCGUGUGUGU | TGGGAT | 19:11132195 | N/A |
| V5570 or | (g56) | UGGGA (SEQ ID NO: 10723) | | | |
| OMNI-50 | | | | | |
| OMNI-79 | sgRNA59 | UGUUGGGAUGGGAUCCC | AGGGAA | 19:11132209 | N/A |
| V5570 or | (g59) | AGGCC (SEQ ID NO: 10486) | | | |
| OMNI-50 | | | | | |
| OMNI-79 | sgRNA60 | GUUGGGAUGGGAUCCCA | GGGAAA | 19:11132210 | N/A |
| V5570 or | (g60) | GGCCA (SEQ ID NO: 9839) | | | |
| OMNI-50 | | | | | |
| OMNI-79 | sgRNA76 | GAAGCCACUCAUACAUAC | GGGACA | 19:11133699 | 96 from polyA |
| V5570 or | (g76) | AACG (SEQ ID NO: 8967) | | | signal |
| OMNI-50 | | | | | |
| OMNI-79 | sgRNA77 | AGAAGCCACUCAUACAUA | GGGGAC | 19:11133700 | 95 from polyA |
| V5570 or | (g77) | CAAC (SEQ ID NO: 7603) | | | signal |
| OMNI-50 | | | | | |
| OMNI-79 | sgRNA79 | GUUGUAUGUAUGAGUGG | GGGAGA | 19:11133713 | 67 from polyA |
| V5570 or | (g79) | CUUCU (SEQ ID NO: 9843) | | | signal |
| OMNI-50 | | | | | |
| OMNI-79 | sgRNA81 | GUAUGAGUGGCUUCUGG | GGGTGT | 19:11133706 | 60 from polyA |
| V5570 or | (g81) | GAGAU (SEQ ID NO: 9673) | | | signal |
| OMNI-50 | | | | | |
| OMNI-103 | sgRNA89 | GUGUCACGGUGGAGAGA | AAAACT | 19:11131576 | 259 from stop |
| | (g89) | AACUC (SEQ ID NO: 9794) | | | codon |
| OMNI-103 | sgRNA90 | GAGGAUUGUGUCACGGU | GAAACT | 19:11131583 | 265 from stop |
| | (g90) | GGAGA (SEQ ID NO: 9085) | | | codon |
| OMNI-103 | sgRNA91 | ACCAAUCUCUAAGCCAAA | TAAACT | 19:11131718 | 429 from stop |
| | (g91) | CCCC (SEQ ID NO: 7460) | | | codon |
| OMNI-103 | sgRNA92 | UUGCAUAGAAGAGGUAA | TTGACT | 19:11131750 | 433 from stop |
| | (g92) | ACACG (SEQ ID NO: 10613) | | | codon |
| OMNI-103 | sgRNA93 | GAAUCCGUGGUGGCACCG | CAAACT | 19:11131909 | 624 from stop |
| | (g93) | AGAC (SEQ ID NO: 8985) | | | codon |
| OMNI-103 | sgRNA94 | UAAUAAAUAUUAAGGGU | GTGACT | 19:11131976 | 663 from stop |
| | (g94) | GACCA (SEQ ID NO: 9903) | | | codon |
| OMNI-103 | sgRNA95 | AAAUGUACACAGUGUAC | TGAACT | 19:11132141 | N/A |
| | (g95) | AACUC (SEQ ID NO: 7206) | | | |
| OMNI-103 | sgRNA96 | AAAUGCCAAAUGUACAC | ACAACT | 19:11132148 | N/A |
| | (g96) | AGUGU (SEQ ID NO: 7201) | | | |
| OMNI-103 | sgRNA97 | GACAGAGAGGGGCAGGU | GGGACT | 19:11132260 | N/A |
| | (g97) | UGACC (SEQ ID NO: 9007) | | | |
| OMNI-103 | sgRNA98 | AAAGCCGUGAUCGUGAA | AGAACT | 19:11132290 | N/A |
| | (g98) | UAUCG (SEQ ID NO: 7175) | | | |
| OMNI-103 | sgRNA100 | UGCCACCGUACCCAGCUG | TTAACT | 19:11133039 | N/A |
| | (g100) | AUUU (SEQ ID NO: 10301) | | | |
| OMNI-103 | sgRNA101 | AUGAAGACCCUAUUUCA | ACAACT | 19:11133181 | N/A |
| | (g101) | GAAAU (SEQ ID NO: 7904) | | | |
| OMNI-103 | sgRNA102 | CCUCCAGUCUGGAUCGUU | GGGACT | 19:11133227 | N/A |
| | (g102) | UGAC (SEQ ID NO: 8537) | | | |
| OMNI-103 | sgRNA104 | GAGAGACAGUGACAGCC | CAGACT | 19:11133301 | 469 from |
| | (g103) | UCCGU (SEQ ID NO: 9067) | | | poly A signal |
| SpCas9 | sgRNA1 | CAGUGCCCAUGCAAUGGC | GGGTTG | 19:11131463 | 171 from stop |
| | (g1) | UU (SEQ ID NO: 1120) | | | codon |
| SpCas9 | sgRNA2 | AUUCAUCUGGGAGGCAG | AGGCTT | 19:11131433 | 141 from stop |
| | (g2) | AAC (SEQ ID NO: 860) | | | codon |
| SpCas9 | sgRNA3 | AAGGAUAAGAGAAACAG | CGGGGG | 19:11131516 | 224 from stop |
| | (g3) | GCC (SEQ ID NO: 181) | | | codon |
| SpCas9 | sgRNA4 | AACCCUUCCUGAGACCUC | CGGCCT | 19:11131345 | 53 from stop |
| | (g4) | GC (SEQ ID NO: 119) | | | codon |
| SpCas9 | sgRNA6 | CAAAACUUCCUGGAGAG | TGGAGG | 19:11131557 | 243 from stop |
| | (g6) | AAA (SEQ ID NO: 901) | | | codon |
| SpCas9 | sgRNA7 | GAGAGAAACUCAAAACU | TGGAGA | 19:11131567 | 253 from stop |
| | (g7) | UCC (SEQ ID NO: 1927) | | | codon |
| SpCas9 | sgRNA8 | GUUACUGUUGCACUGAU | CGGAGA | 19:11133279 | 502 from |
| | (g8) | GUC (SEQ ID NO: 2656) | | | poly A signal |
| SpCas9 | sgRNA9 | AUGAGUGGCUUCUGGGA | GGGTGT | 19:11133713 | 60 from polyA |
| | (g9) | GAU (SEQ ID NO: 796) | | | signal |
| SpCas9 | sgRNA14 | AGAAAGUGCAAGGAGAC | GGGAAT | 19:11132114 | 800 from stop |
| | (g14) | CAC (SEQ ID NO: 477) | | | codon |
| SpCas9 | sgRNA19 | GAGAAAGUGCAAGGAGA | CGGGAA | 19:11132115 | 801 from stop |
| | (g19) | CCA (SEQ ID NO: 1913) | | | codon |
| SpCas9 | sgRNA20 | CUCUGAACUGAGAAAGU | AGGAGA | 19:11132124 | 810 from stop |
| | (g20) | GCA (SEQ ID NO: 1640) | | | codon |
| SpCas9 | sgRNA22 | UAGGCUUGUGGGACACU | GGGGAT | out of range | Downstream to |
| | (g22) | ACA (SEQ ID NO: 10736) | | | the 3'UTR |
| SpCas9 | sgRNA82 | GGAAGUGGGUAGGGGUC | AGGATG | 19:11132088 | 774 from stop |
| | (g82) | GGG (SEQ ID NO: 2219) | | | codon |
| SpCas9 | sgRNA83 | AAUGGAAGUGGGUAGGG | GGGAGG | 19:11132091 | 777 from stop |
| | (g83) | GUC (SEQ ID NO: 247) | | | codon |
| SpCas9 | sgRNA84 | GAAUGGAAGUGGGUAGG | CGGGAG | 19:11132092 | 778 from stop |
| | (g84) | GGU (SEQ ID NO: 1853) | | | codon |
| SpCas9 | sgRNA85 | CAUCUCUUAAAAAAUGA | TGGCCA | 19:11132889 | N/A |
| | (g85) | AUU (SEQ ID NO: 1151) | | | |
| SpCas9 | sgRNA86 | AAAUGAAUUUGGCCAGA | AGGTGC | 19:11132901 | N/A |
| | (g86) | CAC (SEQ ID NO: 76) | | | |
| SpCas9 | sgRNA1m | GAGCAACACAGAGCCCAG | AGGTGG | N/A (mouse | N/A |
| | (glm) | GG (SEQ ID NO: 10737) | | specific) | |
| SpCas9 | sgRNA6m | GUGCGUUGCUUUGAGUG | GGGAAC | N/A (mouse | N/A |
| | (g6m) | GGU (SEQ ID NO: 10738) | | specific) | |

### Example 3: Summary of Results—CRISPR-Based Gene Editing Enhances LDLR Expression and Boosts LDL-C uptake in Familial Hypercholesterolemia

[0196] Familial hypercholesterolemia (FH) is a prevalent autosomal dominant disorder characterized by a lifelong elevation of low-density lipoprotein cholesterol (LDL-C), which results in early-onset atherosclerosis and coronary events. About 85% to 90% of genetically confirmed FH is caused by pathogenic mutations in the LDLR gene, haploinsufficiency of which leads to reduced LDL-C uptake. Lifelong lipid-lowering medications, such as statins and Ezetimibe, are currently available, however, they are often intolerable by patients and fail to attain desired LDL-C levels. A more recent therapeutic approach is based on subcutaneously injected monoclonal antibodies that transiently inhibit Proprotein Convertase Subtilisin/Kexin type 9 (PCSK9), a protein that promotes LDLR lysosomal degradation. Permanent inhibition of PCSK9 by base editing is currently being developed, but the long-lasting consequences of such irreversible knockdown of a gene that is not even the pathogenic basis of FH remain unknown. Additionally, such an approach is frequently insufficient as a monotherapy, and is thus prescribed in combination with a statin therapy.

[0197] This disclosure presents a CRISPR-based gene editing strategy for upregulation of LDLR expression by excising at least one portion of the LDLR 3′ UTR, which contains sites that negatively regulate LDLR expression.

[0198] This editing strategy was tested in a HepG2 cell line, FH patient-derived lymphoblastoid cell lines (LCLs), and a mouse hepatoma cell line (Hepal-6). Excision of the LDLR 3′UTR was confirmed by ddPCR and LDLR mRNA levels were quantified by qRT-PCR. Total and membrane-bound LDLR levels were determined by western blot and flow cytometry, respectively, using specific antibodies. Finally, the effect of LDLR 3′UTR excision on cholesterol uptake was assessed by measuring the cellular intake of fluorescently labeled LDL-C using flow cytometry.

[0199] Excision efficiency in HepG2 cells was about 60%. Excised cells showed a 3- to 6-fold upregulation of LDLR mRNA levels and a 3-fold increase in membrane-bound LDLR as compared to non-treated cells. LDLR 3′UTR excision resulted in a 2-fold increase in the uptake of cholesterol at all time points tested. Patient-derived LCLs showed similar outcomes, with a 3-4-fold increase in LDL-C uptake. An increase in LDLR mRNA levels and membrane protein expression followed by an enhanced LDL-C uptake was also observed in an excised mouse liver cell line, further supporting the future evaluation of the editing strategy in an in vivo mouse model. A comparative analysis showed that the strategy outperforms PCSK9 knockout and statins in increasing cholesterol uptake.

[0200] These findings support the CRISPR-based gene editing strategy of truncating regions responsible for rapid LDLR mRNA turnover to enhance LDLR expression and boost LDL-C uptake. This unique approach could be useful for a variety of hypercholesterolemia-related disorders.

### REFERENCES

[0201] 1. Ahmad and Allen (1992) “Antibody-mediated Specific Binging and Cytotoxicity of Lipsome-entrapped Doxorubicin to Lung Cancer Cells in Vitro”, Cancer Research 52:4817-20.
[0202] 2. Anderson (1992) “Human gene therapy”, Science 256:808-13.
[0203] 3. Anzalone et al. (2019) “Search-and-replace genome editing without double-strand brakes or donor DNA”, Nature 576, 149-157.
[0204] 4. Basha et al. (2011) “Influence of Cationic Lipid Composition on Gene Silencing Properties of Lipid Nanoparticle Formulations of siRNA in Antigen-Presenting Cells”, Mol. Ther. 19(12):2186-200.
[0205] 5. Behr (1994) “Gene transfer with synthetic cationic amphiphiles: Prospects for gene therapy”, Bioconjuage Chem 5:382-89.
[0206] 6. Bjornsson et al. (2021) “Lifelong reduction in LDL (low-density lipoprotein) cholesterol due to a gain-of-function mutation in LDLR”, Circulation: Genomic and Precision Medicine, 14:e003029.
[0207] 7. Blaese (1995) “Vectors in cancer therapy: how will they deliver”, Cancer Gene Ther. 2:291-97.
[0208] 8. Blaese et al. (1995) “T lympocyte-directed gene therapy for ADA-SCID: initial trial results after 4 years”, Science 270(5235):475-80.
[0209] 9. Buchschacher and Panganiban (1992) “Human immunodeficiency virus vectors for inducible expression of foreign genes”, J. Virol. 66:2731-39.
[0210] 10. Burstein et al. (2017) “New CRISPR-Cas systems from uncultivated microbes”, Nature 542:237-41.
[0211] 11. Chan et al. (1997) “Surface expression of low density lipoprotein receptor in EBV-transformed lymphocytes: characterization and use for studying familial hypercholesterolemia”, Atherosclerosis 131:149-160.
[0212] 12. Chang and Wilson (1987) “Modification of DNA ends can decrease end-joining relative to homologous recombination in mammalian cells”, Proc. Natl. Acad. Sci. USA 84:4959-4963.
[0213] 13. Chung et al. (2006) “Agrobacterium is not alone: gene transfer to plants by viruses and other bacteria”, Trends Plant Sci. 11(1):1-4.
[0214] 14. Coelho et al. (2013) “Safety and efficacy of RNAi therapy for transthyretin amyloidosis” N. Engl. J. Med. 369, 819-829.
[0215] 15. Collias and Beisel (2021) “CRISPR technologies and the search for the PAM-free nuclease”, Nature Communications 12, 555.
[0216] 16. Crystal (1995) “Transfer of genes to humans: early lessons and obstacles to success”, Science 270(5235):404-10.
[0217] 17. Dillon (1993) “Regulation gene expression in gene therapy” Trends in Biotechnology 11(5):167-173.
[0218] 18. Dranoff et al. (1997) “A phase I study of vaccination with autologous, irradiated melanoma cells engineered to secrete human granulocyte macrophage colony stimulating factor”, Hum. Gene Ther. 8(1): 111-23.
[0219] 19. Dunbar et al. (1995) “Retrovirally marked CD34-enriched peripheral blood and bone marrow cells contribute to long-term engraftment after autologous transplantation”, Blood 85:3048-57.
[0220] 20. Ellem et al. (1997) “A case report: immune responses and clinical course of the first human use of ganulocyte/macrophage-colony-stimulating-factor-tranduced autologous melanoma cells for immunotherapy”, Cancer Immunol Immunother 44:10-20.
[0221] 21. Gao and Huang (1995) “Cationic liposome-mediated gene transfer” Gene Ther. 2(10):710-22.
[0222] 22. Haddada et al. (1995) “Gene Therapy Using Adenovirus Vectors”, in: The Molecular Repertoire of Adenoviruses III: Biology and Pathogenesis, ed. Doerfler and Böhm, pp. 297-306.
[0223] 23. Han et al. (1995) “Ligand-directed retro-viral targeting of human breast cancer cells”, Proc Natl Acad Sci U.S.A. 92(21):9747-51.
[0224] 24. Hu et al. (2018) “Evolved Cas9 variants with broad PAM compatibility and high DNA specificity”, Nature 556(7699): 57-63.
[0225] 25. Jiang et al. (2015) “The distribution and characteristics of LDL receptor mutations in China: A systematic review”, Scientific Reports 5:17272.
[0226] 26. Jinek et al. (2012) “A programmable dual-RNA-guided DNA endonuclease in adaptive bacterial immunity,” Science 337(6096): 816-21.
[0227] 27. Johan et al. (1992) “GLVR1, a receptor for gibbon ape leukemia virus, is homologous to a phosphate permease of Neurospora crassa and is expressed at high levels in the brain and thymus”, J Virol 66(3):1635-40.
[0228] 28. Judge et al. (2006) “Design of noninflammatory synthetic siRNA mediating potent gene silencing in vivo”, Mol Ther. 13(3):494-505.
[0229] 29. Knouff et al. (2001) “Doubling expression of the low density lipoprotein receptor by truncation of the 3′-untranslated region sequence ameliorates type III hyperlipoproteinemia in mice expressing the human ApoE2 isoform”, JBC 276(9):3856-3862.
[0230] 30. Kohn et al. (1995) “Engraftment of gene-modified umbilical cord blood cells in neonates with adnosine deaminase deficiency”, Nature Medicine 1:1017-23.
[0231] 31. Kremer and Perricaudet (1995) “Adenovirus and adeno-associated virus mediated gene transfer”, Br. Med. Bull. 51(1): 31-44.
[0232] 32. Macdiarmid et al. (2009) “Sequential treatment of drug-resistant tumors with targeted minicells containing siRNA or a cytotoxic drug”, Nat Biotehcnol. 27(7):643-51.
[0233] 33. Malech et al. (1997) “Prolonged production of NADPH oxidase-corrected granulocyes after gene therapy of chronic granulomatous disease”, PNAS 94(22): 12133-38.
[0234] 34. Miller et al. (1991) “Construction and properties of retrovirus packaging cells based on gibbon ape leukemia virus”, J Virol. 65(5):2220-24.
[0235] 35. Miller (1992) “Human gene therapy comes of age”, Nature 357:455-60.
[0236] 36. Mitani and Caskey (1993) “Delivering therapeutic genes—matching approach and application”, Trends in Biotechnology 11(5): 162-66.
[0237] 37. Nabel and Felgner (1993) “Direct gene transfer for immunotherapy and immunization”, Trends in Biotechnology 11(5):211-15.
[0238] 38. Nishimasu et al. (2018) “Engineered CRISPR-Cas9 nuclease with expanded targeting space”, Science 361(6408): 1259-1262.
[0239] 39. Remy et al. (1994) “Gene Transfer with a Series of Lipphilic DNA-Binding Molecules”, Bioconjugate Chem. 5(6):647-54.
[0240] 40. Soutar and Naoumova (2007) “Mechanisms of disease: genetic causes of familial hypercholeserolemia”, Nat Clin Pract Cardiovasc Med. 4(4): 214-25.
[0241] 41. Sentmanat et al. (2018) “A Survey of Validation Strategies for CRISPR-Cas9 Editing”, Scientific Reports 8:888, doi: 10.1038/s41598-018-19441-8.
[0242] 42. Sommerfelt et al. (1990) “Localization of the receptor gene for type D simian retroviruses on human chromosome 19”, J. Virol. 64(12):6214-20.
[0243] 43. Van Brunt (1988) “Molecular framing: transgenic animals as bioactors” Biotechnology 6:1149-54.
[0244] 44. Vigne et al. (1995) “Third-generation adenovectors for gene therapy”, Restorative Neurology and Neuroscience 8(1,2): 35-36.
[0245] 45. Walton et al. (2020) “Unconstrained genome targeting with near-PAMless engineered CRISPR-Cas9 variants”, Science 368(6488):290-296.
[0246] 46. Weissman and Kariko (2015) “mRNA:Fulfilling the promise of gene therapy”, Molecular Therapy (9): 1416-7.
[0247] 47. Wilson et al. (1989) “Formation of infectious hybrid virion with gibbon ape leukemia virus and human T-cell leukemia virus retroviral envelope glycoproteins and the gag and pol proteins of Moloney murine leukemia virus”, J. Virol. 63:2374-78.
[0248] 48. Yu et al. (1994) “Progress towards gene therapy for HIV infection”. Gene Ther. 1(1):13-26.
[0249] 49. Zetsche et al. (2015) “Cpf1 is a single RNA-guided endonuclease of a class 2 CRIPSR-Cas system” Cell 163(3): 759-71.
[0250] 50. Zuris et al. (2015) “Cationic lipid-mediated delivery of proteins enables efficient protein based genome editing in vitro and in vivo” Nat Biotechnol. 33(1): 73-80.

The application's sequence listing, which the Patent Office published only in electronic form, follows.

SEQUENCE LISTING (10758 sequences)

SEQ ID NO: 1 - RNA, 20 nt, Artificial Sequence
  LDLR targeting guide sequence portion
aaaaaaccaugcauggugca

SEQ ID NO: 2 - RNA, 20 nt, Artificial Sequence
  LDLR targeting guide sequence portion
aaaaaauccccacuaucugu

SEQ ID NO: 3 - RNA, 20 nt, Artificial Sequence
  LDLR targeting guide sequence portion
aaaaaaugaauuuggccaga

SEQ ID NO: 4 - RNA, 20 nt, Artificial Sequence
  LDLR targeting guide sequence portion
aaaaaccaugcauggugcau

SEQ ID NO: 5 - RNA, 20 nt, Artificial Sequence
  LDLR targeting guide sequence portion
aaaaagcguugcacacaguc

SEQ ID NO: 6 - RNA, 20 nt, Artificial Sequence
  LDLR targeting guide sequence portion
aaaaagugacacccaucucc

SEQ ID NO: 7 - RNA, 20 nt, Artificial Sequence
  LDLR targeting guide sequence portion
aaaaaguuaaaaaucagcug

SEQ ID NO: 8 - RNA, 20 nt, Artificial Sequence
  LDLR targeting guide sequence portion
aaaaauaaauaaauccucca

SEQ ID NO: 9 - RNA, 20 nt, Artificial Sequence
  LDLR targeting guide sequence portion
aaaaaucagcuggguacggu

SEQ ID NO: 10 - RNA, 20 nt, Artificial Sequence
  LDLR targeting guide sequence portion
aaaaauccccacuaucugua

SEQ ID NO: 11 - RNA, 20 nt, Artificial Sequence
  LDLR targeting guide sequence portion
aaaaaugaauuuggccagac

SEQ ID NO: 12 - RNA, 20 nt, Artificial Sequence
  LDLR targeting guide sequence portion
aaaacaaagcucuggcaggc

SEQ ID NO: 13 - RNA, 20 nt, Artificial Sequence
  LDLR targeting guide sequence portion
aaaacaaggccggcgagguc

SEQ ID NO: 14 - RNA, 20 nt, Artificial Sequence
  LDLR targeting guide sequence portion
aaaacaugcacggugaggcc

SEQ ID NO: 15 - RNA, 20 nt, Artificial Sequence
  LDLR targeting guide sequence portion
aaaaccaugcauggugcauc

SEQ ID NO: 16 - RNA, 20 nt, Artificial Sequence
  LDLR targeting guide sequence portion
aaaacuuccuggagagaaau

SEQ ID NO: 17 - RNA, 20 nt, Artificial Sequence
  LDLR targeting guide sequence portion
aaaagcguugcacacagucc

SEQ ID NO: 18 - RNA, 20 nt, Artificial Sequence
  LDLR targeting guide sequence portion
aaaagugacacccaucuccc

SEQ ID NO: 19 - RNA, 20 nt, Artificial Sequence
  LDLR targeting guide sequence portion
aaaaguuaaaaaucagcugg

SEQ ID NO: 20 - RNA, 20 nt, Artificial Sequence
  LDLR targeting guide sequence portion
aaaauaaauaaauccuccag

SEQ ID NO: 21 - RNA, 20 nt, Artificial Sequence
  LDLR targeting guide sequence portion
aaaaucagcuggguacggug

SEQ ID NO: 22 - RNA, 20 nt, Artificial Sequence
  LDLR targeting guide sequence portion
aaaaucccaacccaagccau

SEQ ID NO: 23 - RNA, 20 nt, Artificial Sequence
  LDLR targeting guide sequence portion
aaaauccccacuaucuguac

SEQ ID NO: 24 - RNA, 20 nt, Artificial Sequence
  LDLR targeting guide sequence portion
aaaaugaauuuggccagaca

SEQ ID NO: 25 - RNA, 20 nt, Artificial Sequence
  LDLR targeting guide sequence portion
aaacaaagcucuggcaggca

SEQ ID NO: 26 - RNA, 20 nt, Artificial Sequence
  LDLR targeting guide sequence portion
aaacaaggccggcgaggucu

SEQ ID NO: 27 - RNA, 20 nt, Artificial Sequence
  LDLR targeting guide sequence portion
aaacacguugacuccugagu

SEQ ID NO: 28 - RNA, 20 nt, Artificial Sequence
  LDLR targeting guide sequence portion
aaacaggcccggggggacca

SEQ ID NO: 29 - RNA, 20 nt, Artificial Sequence
  LDLR targeting guide sequence portion
aaacauaacaaaaaaucccc

SEQ ID NO: 30 - RNA, 20 nt, Artificial Sequence
  LDLR targeting guide sequence portion
aaacaugcacggugaggccg

SEQ ID NO: 31 - RNA, 20 nt, Artificial Sequence
  LDLR targeting guide sequence portion
aaacauggaagaugaaaggg

SEQ ID NO: 32 - RNA, 20 nt, Artificial Sequence
  LDLR targeting guide sequence portion
aaaccaaaaaguuaaaaauc

SEQ ID NO: 33 - RNA, 20 nt, Artificial Sequence
  LDLR targeting guide sequence portion
aaaccaaaaucccaacccaa

SEQ ID NO: 34 - RNA, 20 nt, Artificial Sequence
  LDLR targeting guide sequence portion
aaaccacuguauagaagguu

SEQ ID NO: 35 - RNA, 20 nt, Artificial Sequence
  LDLR targeting guide sequence portion
aaaccagaaaggcuuaucac

SEQ ID NO: 36 - RNA, 20 nt, Artificial Sequence
  LDLR targeting guide sequence portion
aaaccaugcauggugcauca

SEQ ID NO: 37 - RNA, 20 nt, Artificial Sequence
  LDLR targeting guide sequence portion
aaacccaccucgaaagacac

SEQ ID NO: 38 - RNA, 20 nt, Artificial Sequence
  LDLR targeting guide sequence portion
aaaccccuaaacucaggagu

SEQ ID NO: 39 - RNA, 20 nt, Artificial Sequence
  LDLR targeting guide sequence portion
aaacccugguugcuguauuu

SEQ ID NO: 40 - RNA, 20 nt, Artificial Sequence
  LDLR targeting guide sequence portion
aaacgauccagacuggagga

SEQ ID NO: 41 - RNA, 20 nt, Artificial Sequence
  LDLR targeting guide sequence portion
aaacucaaaacuuccuggag

SEQ ID NO: 42 - RNA, 20 nt, Artificial Sequence
  LDLR targeting guide sequence portion
aaacucaggagucaacgugu

SEQ ID NO: 43 - RNA, 20 nt, Artificial Sequence
  LDLR targeting guide sequence portion
aaacucauucaccaaaugau

SEQ ID NO: 44 - RNA, 20 nt, Artificial Sequence
  LDLR targeting guide sequence portion
aaacuuccuggagagaaaug

SEQ ID NO: 45 - RNA, 20 nt, Artificial Sequence
  LDLR targeting guide sequence portion
aaagaaccugaagucccguc

SEQ ID NO: 46 - RNA, 20 nt, Artificial Sequence
  LDLR targeting guide sequence portion
aaagaagaggcauuucagag

SEQ ID NO: 47 - RNA, 20 nt, Artificial Sequence
  LDLR targeting guide sequence portion
aaagacacugggugggucau

SEQ ID NO: 48 - RNA, 20 nt, Artificial Sequence
  LDLR targeting guide sequence portion
aaagacagagaagaccaaag

SEQ ID NO: 49 - RNA, 20 nt, Artificial Sequence
  LDLR targeting guide sequence portion
aaagacgacaauggcaguuc

SEQ ID NO: 50 - RNA, 20 nt, Artificial Sequence
  LDLR targeting guide sequence portion
aaagauuauuugcacgaacu

SEQ ID NO: 51 - RNA, 20 nt, Artificial Sequence
  LDLR targeting guide sequence portion
aaagcaguggcauaaucaua

SEQ ID NO: 52 - RNA, 20 nt, Artificial Sequence
  LDLR targeting guide sequence portion
aaagcauugccugccagagc

SEQ ID NO: 53 - RNA, 20 nt, Artificial Sequence
  LDLR targeting guide sequence portion
aaagccacuugcuucucugg

SEQ ID NO: 54 - RNA, 20 nt, Artificial Sequence
  LDLR targeting guide sequence portion
aaagccgugaucgugaauau

SEQ ID NO: 55 - RNA, 20 nt, Artificial Sequence
  LDLR targeting guide sequence portion
aaagcguugcacacagucca

SEQ ID NO: 56 - RNA, 20 nt, Artificial Sequence
  LDLR targeting guide sequence portion
aaagcucuggcaggcaaugc

SEQ ID NO: 57 - RNA, 20 nt, Artificial Sequence
  LDLR targeting guide sequence portion
aaaggaagaaaccaaaaucc

SEQ ID NO: 58 - RNA, 20 nt, Artificial Sequence
  LDLR targeting guide sequence portion
aaaggcuaaccuggcugucu

SEQ ID NO: 59 - RNA, 20 nt, Artificial Sequence
  LDLR targeting guide sequence portion
aaaggcuuaucacgguuccc

SEQ ID NO: 60 - RNA, 20 nt, Artificial Sequence
  LDLR targeting guide sequence portion
aaagggauucauggcgucgg

SEQ ID NO: 61 - RNA, 20 nt, Artificial Sequence
  LDLR targeting guide sequence portion
aaaggggaggggaugucagg

SEQ ID NO: 62 - RNA, 20 nt, Artificial Sequence
  LDLR targeting guide sequence portion
aaagugacacccaucuccca

SEQ ID NO: 63 - RNA, 20 nt, Artificial Sequence
  LDLR targeting guide sequence portion
aaagugcaaacauaacaaaa

SEQ ID NO: 64 - RNA, 20 nt, Artificial Sequence
  LDLR targeting guide sequence portion
aaagugcaaggagaccacgg

SEQ ID NO: 65 - RNA, 20 nt, Artificial Sequence
  LDLR targeting guide sequence portion
aaaguuaaaaaucagcuggg

SEQ ID NO: 66 - RNA, 20 nt, Artificial Sequence
  LDLR targeting guide sequence portion
aaauaaauaaauccuccagu

SEQ ID NO: 67 - RNA, 20 nt, Artificial Sequence
  LDLR targeting guide sequence portion
aaauaaauccuccagucugg

SEQ ID NO: 68 - RNA, 20 nt, Artificial Sequence
  LDLR targeting guide sequence portion
aaauacagcaaccaggguuu

SEQ ID NO: 69 - RNA, 20 nt, Artificial Sequence
  LDLR targeting guide sequence portion
aaauauauaaaacaaagcuc

SEQ ID NO: 70 - RNA, 20 nt, Artificial Sequence
  LDLR targeting guide sequence portion
aaauauuaagggugaccagu

SEQ ID NO: 71 - RNA, 20 nt, Artificial Sequence
  LDLR targeting guide sequence portion
aaaucagcuggguacggugg

SEQ ID NO: 72 - RNA, 20 nt, Artificial Sequence
  LDLR targeting guide sequence portion
aaaucccaacccaagccauu

SEQ ID NO: 73 - RNA, 20 nt, Artificial Sequence
  LDLR targeting guide sequence portion
aaauccccacuaucuguaca

SEQ ID NO: 74 - RNA, 20 nt, Artificial Sequence
  LDLR targeting guide sequence portion
aaauccuccagucuggaucg

SEQ ID NO: 75 - RNA, 20 nt, Artificial Sequence
  LDLR targeting guide sequence portion
aaaucgccguguuacuguug

SEQ ID NO: 76 - RNA, 20 nt, Artificial Sequence
  LDLR targeting guide sequence portion
aaaugaauuuggccagacac

SEQ ID NO: 77 - RNA, 20 nt, Artificial Sequence
  LDLR targeting guide sequence portion
aaaugaucuggcugaauccg

SEQ ID NO: 78 - RNA, 20 nt, Artificial Sequence
  LDLR targeting guide sequence portion
aaaugaugccacuucccaga

SEQ ID NO: 79 - RNA, 20 nt, Artificial Sequence
  LDLR targeting guide sequence portion
aaaugccaaauguacacagu

SEQ ID NO: 80 - RNA, 20 nt, Artificial Sequence
  LDLR targeting guide sequence portion
aaaugccuccaagccauuca

SEQ ID NO: 81 - RNA, 20 nt, Artificial Sequence
  LDLR targeting guide sequence portion
aaaugccucuucuuuaugua

SEQ ID NO: 82 - RNA, 20 nt, Artificial Sequence
  LDLR targeting guide sequence portion
aaaugccugagcucaaacca

SEQ ID NO: 83 - RNA, 20 nt, Artificial Sequence
  LDLR targeting guide sequence portion
aaaugcgucccuguacagau

SEQ ID NO: 84 - RNA, 20 nt, Artificial Sequence
  LDLR targeting guide sequence portion
aaauggaggugucauccugg

SEQ ID NO: 85 - RNA, 20 nt, Artificial Sequence
  LDLR targeting guide sequence portion
aaauguacacaguguacaac

SEQ ID NO: 86 - RNA, 20 nt, Artificial Sequence
  LDLR targeting guide sequence portion
aaauucauuuuuuaagagau

SEQ ID NO: 87 - RNA, 20 nt, Artificial Sequence
  LDLR targeting guide sequence portion
aacaaaaaauccccacuauc

SEQ ID NO: 88 - RNA, 20 nt, Artificial Sequence
  LDLR targeting guide sequence portion
aacaaagcucuggcaggcaa

SEQ ID NO: 89 - RNA, 20 nt, Artificial Sequence
  LDLR targeting guide sequence portion
aacaaauacagcaaccaggg

SEQ ID NO: 90 - RNA, 20 nt, Artificial Sequence
  LDLR targeting guide sequence portion
aacaaggccggcgaggucuc

SEQ ID NO: 91 - RNA, 20 nt, Artificial Sequence
  LDLR targeting guide sequence portion
aacacaaaugccaaauguac

SEQ ID NO: 92 - RNA, 20 nt, Artificial Sequence
  LDLR targeting guide sequence portion
aacacacaacagcagauggc

SEQ ID NO: 93 - RNA, 20 nt, Artificial Sequence
  LDLR targeting guide sequence portion
aacacacacgacagaaaaca

SEQ ID NO: 94 - RNA, 20 nt, Artificial Sequence
  LDLR targeting guide sequence portion
aacacauacccaucaacgac

SEQ ID NO: 95 - RNA, 20 nt, Artificial Sequence
  LDLR targeting guide sequence portion
aacacggcgauuucagaaag

SEQ ID NO: 96 - RNA, 20 nt, Artificial Sequence
  LDLR targeting guide sequence portion
aacacguugacuccugaguu

SEQ ID NO: 97 - RNA, 20 nt, Artificial Sequence
  LDLR targeting guide sequence portion
aacagaugaagacccuauuu

SEQ ID NO: 98 - RNA, 20 nt, Artificial Sequence
  LDLR targeting guide sequence portion
aacagcagauggcaccaacg

SEQ ID NO: 99 - RNA, 20 nt, Artificial Sequence
  LDLR targeting guide sequence portion
aacaggcccggggggaccag

SEQ ID NO: 100 - RNA, 20 nt, Artificial Sequence
  LDLR targeting guide sequence portion
aacaggcuucggacagugcc

SEQ ID NO: 101 - RNA, 20 nt, Artificial Sequence
  LDLR targeting guide sequence portion
aacaguaacacggcgauuuc

SEQ ID NO: 102 - RNA, 20 nt, Artificial Sequence
  LDLR targeting guide sequence portion
aacaguuucaaccaauauac

SEQ ID NO: 103 - RNA, 20 nt, Artificial Sequence
  LDLR targeting guide sequence portion
aacauaacaaaaaaucccca

SEQ ID NO: 104 - RNA, 20 nt, Artificial Sequence
  LDLR targeting guide sequence portion
aacaucugccuggagucccg

SEQ ID NO: 105 - RNA, 20 nt, Artificial Sequence
  LDLR targeting guide sequence portion
aacaugcacggugaggccgg

SEQ ID NO: 106 - RNA, 20 nt, Artificial Sequence
  LDLR targeting guide sequence portion
aacauggaagaugaaagggg

SEQ ID NO: 107 - RNA, 20 nt, Artificial Sequence
  LDLR targeting guide sequence portion
aaccaaaaaguuaaaaauca

SEQ ID NO: 108 - RNA, 20 nt, Artificial Sequence
  LDLR targeting guide sequence portion
aaccaaaaucccaacccaag

SEQ ID NO: 109 - RNA, 20 nt, Artificial Sequence
  LDLR targeting guide sequence portion
aaccacuguauagaagguuu

SEQ ID NO: 110 - RNA, 20 nt, Artificial Sequence
  LDLR targeting guide sequence portion
aaccagaaaggcuuaucacg

SEQ ID NO: 111 - RNA, 20 nt, Artificial Sequence
  LDLR targeting guide sequence portion
aaccaggguuugcaaaaaua

SEQ ID NO: 112 - RNA, 20 nt, Artificial Sequence
  LDLR targeting guide sequence portion
aaccauccucccaccucagc

SEQ ID NO: 113 - RNA, 20 nt, Artificial Sequence
  LDLR targeting guide sequence portion
aaccaugcauggugcaucag

SEQ ID NO: 114 - RNA, 20 nt, Artificial Sequence
  LDLR targeting guide sequence portion
aacccaagccauugcauggg

SEQ ID NO: 115 - RNA, 20 nt, Artificial Sequence
  LDLR targeting guide sequence portion
aacccaccucgaaagacacu

SEQ ID NO: 116 - RNA, 20 nt, Artificial Sequence
  LDLR targeting guide sequence portion
aacccccuacacagggcccc

SEQ ID NO: 117 - RNA, 20 nt, Artificial Sequence
  LDLR targeting guide sequence portion
aaccccuaaacucaggaguc

SEQ ID NO: 118 - RNA, 20 nt, Artificial Sequence
  LDLR targeting guide sequence portion
aacccugguugcuguauuug

SEQ ID NO: 119 - RNA, 20 nt, Artificial Sequence
  LDLR targeting guide sequence portion
aacccuuccugagaccucgc

SEQ ID NO: 120 - RNA, 20 nt, Artificial Sequence
  LDLR targeting guide sequence portion
aaccgggugucucaggcacu

SEQ ID NO: 121 - RNA, 20 nt, Artificial Sequence
  LDLR targeting guide sequence portion
aaccgugauaagccuuucug

SEQ ID NO: 122 - RNA, 20 nt, Artificial Sequence
  LDLR targeting guide sequence portion
aaccugaagucccgucaaac

SEQ ID NO: 123 - RNA, 20 nt, Artificial Sequence
  LDLR targeting guide sequence portion
aaccugccccucucuguccc

SEQ ID NO: 124 - RNA, 20 nt, Artificial Sequence
  LDLR targeting guide sequence portion
aaccuggcugucuagcaagg

SEQ ID NO: 125 - RNA, 20 nt, Artificial Sequence
  LDLR targeting guide sequence portion
aaccuucuauacagugguuu

SEQ ID NO: 126 - RNA, 20 nt, Artificial Sequence
  LDLR targeting guide sequence portion
aacgacaagauuggggaagu

SEQ ID NO: 127 - RNA, 20 nt, Artificial Sequence
  LDLR targeting guide sequence portion
aacgauccagacuggaggau

SEQ ID NO: 128 - RNA, 20 nt, Artificial Sequence
  LDLR targeting guide sequence portion
aacgcuuuuugggagaauga

SEQ ID NO: 129 - RNA, 20 nt, Artificial Sequence
  LDLR targeting guide sequence portion
aacgggacccccuggcccug

SEQ ID NO: 130 - RNA, 20 nt, Artificial Sequence
  LDLR targeting guide sequence portion
aacggggacaucauucuccc

SEQ ID NO: 131 - RNA, 20 nt, Artificial Sequence
  LDLR targeting guide sequence portion
aacguguuuaccucuucuau

SEQ ID NO: 132 - RNA, 20 nt, Artificial Sequence
  LDLR targeting guide sequence portion
aacucaaaacuuccuggaga

SEQ ID NO: 133 - RNA, 20 nt, Artificial Sequence
  LDLR targeting guide sequence portion
aacucaagugauccagcuca

SEQ ID NO: 134 - RNA, 20 nt, Artificial Sequence
  LDLR targeting guide sequence portion
aacucaggagucaacguguu

SEQ ID NO: 135 - RNA, 20 nt, Artificial Sequence
  LDLR targeting guide sequence portion
aacucauucaccaaaugaug

SEQ ID NO: 136 - RNA, 20 nt, Artificial Sequence
  LDLR targeting guide sequence portion
aacuccugaacucaagugau

SEQ ID NO: 137 - RNA, 20 nt, Artificial Sequence
  LDLR targeting guide sequence portion
aacucugaacugagaaagug

SEQ ID NO: 138 - RNA, 20 nt, Artificial Sequence
  LDLR targeting guide sequence portion
aacugagaaagugcaaggag

SEQ ID NO: 139 - RNA, 20 nt, Artificial Sequence
  LDLR targeting guide sequence portion
aacugccauugucgucuuua

SEQ ID NO: 140 - RNA, 20 nt, Artificial Sequence
  LDLR targeting guide sequence portion
aacuggacugugugcaacgc

SEQ ID NO: 141 - RNA, 20 nt, Artificial Sequence
  LDLR targeting guide sequence portion
aacuuccuggagagaaaugg

SEQ ID NO: 142 - RNA, 20 nt, Artificial Sequence
  LDLR targeting guide sequence portion
aacuuuuugguuuuuguaga

SEQ ID NO: 143 - RNA, 20 nt, Artificial Sequence
  LDLR targeting guide sequence portion
aagaaaccaaaaucccaacc

SEQ ID NO: 144 - RNA, 20 nt, Artificial Sequence
  LDLR targeting guide sequence portion
aagaaccugaagucccguca

SEQ ID NO: 145 - RNA, 20 nt, Artificial Sequence
  LDLR targeting guide sequence portion
aagaagaggcauuucagagg

SEQ ID NO: 146 - RNA, 20 nt, Artificial Sequence
  LDLR targeting guide sequence portion
aagacacugggugggucaug

SEQ ID NO: 147 - RNA, 20 nt, Artificial Sequence
  LDLR targeting guide sequence portion
aagacagagaagaccaaagc

SEQ ID NO: 148 - RNA, 20 nt, Artificial Sequence
  LDLR targeting guide sequence portion
aagacauucaggcuacaaaa

SEQ ID NO: 149 - RNA, 20 nt, Artificial Sequence
  LDLR targeting guide sequence portion
aagaccaaagcauugccugc

SEQ ID NO: 150 - RNA, 20 nt, Artificial Sequence
  LDLR targeting guide sequence portion
aagaccccaucucuuaaaaa

SEQ ID NO: 151 - RNA, 20 nt, Artificial Sequence
  LDLR targeting guide sequence portion
aagacccuauuucagaaaua

SEQ ID NO: 152 - RNA, 20 nt, Artificial Sequence
  LDLR targeting guide sequence portion
aagacgacaauggcaguucu

SEQ ID NO: 153 - RNA, 20 nt, Artificial Sequence
  LDLR targeting guide sequence portion
aagagaaacaggcccggggg

SEQ ID NO: 154 - RNA, 20 nt, Artificial Sequence
  LDLR targeting guide sequence portion
aagaggcauuucagaggcaa

SEQ ID NO: 155 - RNA, 20 nt, Artificial Sequence
  LDLR targeting guide sequence portion
aagagguaaacacguugacu

SEQ ID NO: 156 - RNA, 20 nt, Artificial Sequence
  LDLR targeting guide sequence portion
aagaugaaaggggaggggau

SEQ ID NO: 157 - RNA, 20 nt, Artificial Sequence
  LDLR targeting guide sequence portion
aagaugucacaagggauugg

SEQ ID NO: 158 - RNA, 20 nt, Artificial Sequence
  LDLR targeting guide sequence portion
aagauuauuugcacgaacug

SEQ ID NO: 159 - RNA, 20 nt, Artificial Sequence
  LDLR targeting guide sequence portion
aagauuggggaagugaaugg

SEQ ID NO: 160 - RNA, 20 nt, Artificial Sequence
  LDLR targeting guide sequence portion
aagcaaguggcuuucaacac

SEQ ID NO: 161 - RNA, 20 nt, Artificial Sequence
  LDLR targeting guide sequence portion
aagcacuaggugggcggaca

SEQ ID NO: 162 - RNA, 20 nt, Artificial Sequence
  LDLR targeting guide sequence portion
aagcaguggcauaaucauag

SEQ ID NO: 163 - RNA, 20 nt, Artificial Sequence
  LDLR targeting guide sequence portion
aagcauugccugccagagcu

SEQ ID NO: 164 - RNA, 20 nt, Artificial Sequence
  LDLR targeting guide sequence portion
aagccaaaccccuaaacuca

SEQ ID NO: 165 - RNA, 20 nt, Artificial Sequence
  LDLR targeting guide sequence portion
aagccacucauacauacaac

SEQ ID NO: 166 - RNA, 20 nt, Artificial Sequence
  LDLR targeting guide sequence portion
aagccacuugcuucucuggg

SEQ ID NO: 167 - RNA, 20 nt, Artificial Sequence
  LDLR targeting guide sequence portion
aagccaggaaagggauucau

SEQ ID NO: 168 - RNA, 20 nt, Artificial Sequence
  LDLR targeting guide sequence portion
aagccauucacuuccccaau

SEQ ID NO: 169 - RNA, 20 nt, Artificial Sequence
  LDLR targeting guide sequence portion
aagccauugcaugggcacug

SEQ ID NO: 170 - RNA, 20 nt, Artificial Sequence
  LDLR targeting guide sequence portion
aagcccgugucaaugaaugc

SEQ ID NO: 171 - RNA, 20 nt, Artificial Sequence
  LDLR targeting guide sequence portion
aagccgugaucgugaauauc

SEQ ID NO: 172 - RNA, 20 nt, Artificial Sequence
  LDLR targeting guide sequence portion
aagccuguucugccucccag

SEQ ID NO: 173 - RNA, 20 nt, Artificial Sequence
  LDLR targeting guide sequence portion
aagccuugcuagacagccag

SEQ ID NO: 174 - RNA, 20 nt, Artificial Sequence
  LDLR targeting guide sequence portion
aagccuuucugguuucggag

SEQ ID NO: 175 - RNA, 20 nt, Artificial Sequence
  LDLR targeting guide sequence portion
aagcgagaucccaucucuac

SEQ ID NO: 176 - RNA, 20 nt, Artificial Sequence
  LDLR targeting guide sequence portion
aagcguugcacacaguccag

SEQ ID NO: 177 - RNA, 20 nt, Artificial Sequence
  LDLR targeting guide sequence portion
aagcucuggcaggcaaugcu

SEQ ID NO: 178 - RNA, 20 nt, Artificial Sequence
  LDLR targeting guide sequence portion
aaggaagaaaccaaaauccc

SEQ ID NO: 179 - RNA, 20 nt, Artificial Sequence
  LDLR targeting guide sequence portion
aaggaagguacaaacccacc

SEQ ID NO: 180 - RNA, 20 nt, Artificial Sequence
  LDLR targeting guide sequence portion
aaggagaccacgggaaugga

SEQ ID NO: 181 - RNA, 20 nt, Artificial Sequence
  LDLR targeting guide sequence portion
aaggauaagagaaacaggcc

SEQ ID NO: 182 - RNA, 20 nt, Artificial Sequence
  LDLR targeting guide sequence portion
aaggccggcgaggucucagg

SEQ ID NO: 183 - RNA, 20 nt, Artificial Sequence
  LDLR targeting guide sequence portion
aaggcuaaccuggcugucua

SEQ ID NO: 184 - RNA, 20 nt, Artificial Sequence
  LDLR targeting guide sequence portion
aaggcuuaucacgguucccu

SEQ ID NO: 185 - RNA, 20 nt, Artificial Sequence
  LDLR targeting guide sequence portion
aaggcuugcauagaagaggu

SEQ ID NO: 186 - RNA, 20 nt, Artificial Sequence
  LDLR targeting guide sequence portion
aagggauucauggcgucgga

SEQ ID NO: 187 - RNA, 20 nt, Artificial Sequence
  LDLR targeting guide sequence portion
aagggauuggcaauuguccc

SEQ ID NO: 188 - RNA, 20 nt, Artificial Sequence
  LDLR targeting guide sequence portion
aaggggaggggaugucaggc

SEQ ID NO: 189 - RNA, 20 nt, Artificial Sequence
  LDLR targeting guide sequence portion
aagggugaccagugacucag

SEQ ID NO: 190 - RNA, 20 nt, Artificial Sequence
  LDLR targeting guide sequence portion
aaggguucugggcagggacg

SEQ ID NO: 191 - RNA, 20 nt, Artificial Sequence
  LDLR targeting guide sequence portion
aagguaaccgggugucucag

SEQ ID NO: 192 - RNA, 20 nt, Artificial Sequence
  LDLR targeting guide sequence portion
aagguacaaacccaccucga

SEQ ID NO: 193 - RNA, 20 nt, Artificial Sequence
  LDLR targeting guide sequence portion
aagguuuuuguagccugaau

SEQ ID NO: 194 - RNA, 20 nt, Artificial Sequence
  LDLR targeting guide sequence portion
aagucccggucaaccugccc

SEQ ID NO: 195 - RNA, 20 nt, Artificial Sequence
  LDLR targeting guide sequence portion
aagucccgucaaacgaucca

SEQ ID NO: 196 - RNA, 20 nt, Artificial Sequence
  LDLR targeting guide sequence portion
aagugaauggcuuggaggca

SEQ ID NO: 197 - RNA, 20 nt, Artificial Sequence
  LDLR targeting guide sequence portion
aagugacacccaucucccag

SEQ ID NO: 198 - RNA, 20 nt, Artificial Sequence
  LDLR targeting guide sequence portion
aagugauccagcucagccuc

SEQ ID NO: 199 - RNA, 20 nt, Artificial Sequence
  LDLR targeting guide sequence portion
aagugcaaacauaacaaaaa

SEQ ID NO: 200 - RNA, 20 nt, Artificial Sequence
  LDLR targeting guide sequence portion
aagugcaaggagaccacggg

SEQ ID NO: 201 - RNA, 20 nt, Artificial Sequence
  LDLR targeting guide sequence portion
aagugccugagacacccggu

SEQ ID NO: 202 - RNA, 20 nt, Artificial Sequence
  LDLR targeting guide sequence portion
aaguggaagcacuagguggg

SEQ ID NO: 203 - RNA, 20 nt, Artificial Sequence
  LDLR targeting guide sequence portion
aaguggcaucauuuggugaa

SEQ ID NO: 204 - RNA, 20 nt, Artificial Sequence
  LDLR targeting guide sequence portion
aaguggcuuucaacacacaa

SEQ ID NO: 205 - RNA, 20 nt, Artificial Sequence
  LDLR targeting guide sequence portion
aaguggguaggggucgggag

SEQ ID NO: 206 - RNA, 20 nt, Artificial Sequence
  LDLR targeting guide sequence portion
aaguuaaaaaucagcugggu

SEQ ID NO: 207 - RNA, 20 nt, Artificial Sequence
  LDLR targeting guide sequence portion
aaguuuugaguuucucucca

SEQ ID NO: 208 - RNA, 20 nt, Artificial Sequence
  LDLR targeting guide sequence portion
aauaaaacaaggccggcgag

SEQ ID NO: 209 - RNA, 20 nt, Artificial Sequence
  LDLR targeting guide sequence portion
aauaaauaaauccuccaguc

SEQ ID NO: 210 - RNA, 20 nt, Artificial Sequence
  LDLR targeting guide sequence portion
aauaaauauuaagggugacc

SEQ ID NO: 211 - RNA, 20 nt, Artificial Sequence
  LDLR targeting guide sequence portion
aauaaauccuccagucugga

SEQ ID NO: 212 - RNA, 20 nt, Artificial Sequence
  LDLR targeting guide sequence portion
aauaacacaaaugccaaaug

SEQ ID NO: 213 - RNA, 20 nt, Artificial Sequence
  LDLR targeting guide sequence portion
aauaacccccuacacagggc

SEQ ID NO: 214 - RNA, 20 nt, Artificial Sequence
  LDLR targeting guide sequence portion
aauacagcaaccaggguuug

SEQ ID NO: 215 - RNA, 20 nt, Artificial Sequence
  LDLR targeting guide sequence portion
aauagucacugaacaaauac

SEQ ID NO: 216 - RNA, 20 nt, Artificial Sequence
  LDLR targeting guide sequence portion
aauauauaaaacaaagcucu

SEQ ID NO: 217 - RNA, 20 nt, Artificial Sequence
  LDLR targeting guide sequence portion
aauaucgagaacugccauug

SEQ ID NO: 218 - RNA, 20 nt, Artificial Sequence
  LDLR targeting guide sequence portion
aauauuaagggugaccagug

SEQ ID NO: 219 - RNA, 20 nt, Artificial Sequence
  LDLR targeting guide sequence portion
aauauuuauuaagugccuga

SEQ ID NO: 220 - RNA, 20 nt, Artificial Sequence
  LDLR targeting guide sequence portion
aaucagcuggguacgguggc

SEQ ID NO: 221 - RNA, 20 nt, Artificial Sequence
  LDLR targeting guide sequence portion
aaucauagcucacgacagcc

SEQ ID NO: 222 - RNA, 20 nt, Artificial Sequence
  LDLR targeting guide sequence portion
aaucaugacccacccagugu

SEQ ID NO: 223 - RNA, 20 nt, Artificial Sequence
  LDLR targeting guide sequence portion
aaucccaacccaagccauug

SEQ ID NO: 224 - RNA, 20 nt, Artificial Sequence
  LDLR targeting guide sequence portion
aauccccacuaucuguacag

SEQ ID NO: 225 - RNA, 20 nt, Artificial Sequence
  LDLR targeting guide sequence portion
aaucccuugugacaucuuca

SEQ ID NO: 226 - RNA, 20 nt, Artificial Sequence
  LDLR targeting guide sequence portion
aaucccuuuccuggcuuaag

SEQ ID NO: 227 - RNA, 20 nt, Artificial Sequence
  LDLR targeting guide sequence portion
aauccgugguggcaccgaga

SEQ ID NO: 228 - RNA, 20 nt, Artificial Sequence
  LDLR targeting guide sequence portion
aauccucaaacauggaagau

SEQ ID NO: 229 - RNA, 20 nt, Artificial Sequence
  LDLR targeting guide sequence portion
aauccuccagucuggaucgu

SEQ ID NO: 230 - RNA, 20 nt, Artificial Sequence
  LDLR targeting guide sequence portion
aaucgccguguuacuguugc

SEQ ID NO: 231 - RNA, 20 nt, Artificial Sequence
  LDLR targeting guide sequence portion
aaucuauuuauuuuugcaaa

SEQ ID NO: 232 - RNA, 20 nt, Artificial Sequence
  LDLR targeting guide sequence portion
aaucucuaagccaaaccccu

SEQ ID NO: 233 - RNA, 20 nt, Artificial Sequence
  LDLR targeting guide sequence portion
aaucuugucguugaugggua

SEQ ID NO: 234 - RNA, 20 nt, Artificial Sequence
  LDLR targeting guide sequence portion
aaucuuuguacauaaagaag

SEQ ID NO: 235 - RNA, 20 nt, Artificial Sequence
  LDLR targeting guide sequence portion
aaugaauuuggccagacaca

SEQ ID NO: 236 - RNA, 20 nt, Artificial Sequence
  LDLR targeting guide sequence portion
aaugaguuuggucucggugc

SEQ ID NO: 237 - RNA, 20 nt, Artificial Sequence
  LDLR targeting guide sequence portion
aaugaucuggcugaauccgu

SEQ ID NO: 238 - RNA, 20 nt, Artificial Sequence
  LDLR targeting guide sequence portion
aaugaugccacuucccagag

SEQ ID NO: 239 - RNA, 20 nt, Artificial Sequence
  LDLR targeting guide sequence portion
aaugauguccccguuguaug

SEQ ID NO: 240 - RNA, 20 nt, Artificial Sequence
  LDLR targeting guide sequence portion
aaugccaaauguacacagug

SEQ ID NO: 241 - RNA, 20 nt, Artificial Sequence
  LDLR targeting guide sequence portion
aaugccggggacagagaggg

SEQ ID NO: 242 - RNA, 20 nt, Artificial Sequence
  LDLR targeting guide sequence portion
aaugccuccaagccauucac

SEQ ID NO: 243 - RNA, 20 nt, Artificial Sequence
  LDLR targeting guide sequence portion
aaugccucuucuuuauguac

SEQ ID NO: 244 - RNA, 20 nt, Artificial Sequence
  LDLR targeting guide sequence portion
aaugccugagcucaaaccau

SEQ ID NO: 245 - RNA, 20 nt, Artificial Sequence
  LDLR targeting guide sequence portion
aaugcgucccuguacagaua

SEQ ID NO: 246 - RNA, 20 nt, Artificial Sequence
  LDLR targeting guide sequence portion
aaugcuuuggucuucucugu

SEQ ID NO: 247 - RNA, 20 nt, Artificial Sequence
  LDLR targeting guide sequence portion
aauggaaguggguagggguc

SEQ ID NO: 248 - RNA, 20 nt, Artificial Sequence
  LDLR targeting guide sequence portion
aauggaggugucauccuggu

SEQ ID NO: 249 - RNA, 20 nt, Artificial Sequence
  LDLR targeting guide sequence portion
aauggcaguucucgauauuc

SEQ ID NO: 250 - RNA, 20 nt, Artificial Sequence
  LDLR targeting guide sequence portion
aauggcuuggaggcauuugc

SEQ ID NO: 251 - RNA, 20 nt, Artificial Sequence
  LDLR targeting guide sequence portion
aauggcuuggguugggauuu

SEQ ID NO: 252 - RNA, 20 nt, Artificial Sequence
  LDLR targeting guide sequence portion
aauguacacaguguacaacu

SEQ ID NO: 253 - RNA, 20 nt, Artificial Sequence
  LDLR targeting guide sequence portion
aauucauuuuuuaagagaug

SEQ ID NO: 254 - RNA, 20 nt, Artificial Sequence
  LDLR targeting guide sequence portion
aauugaucacaguaagacau

SEQ ID NO: 255 - RNA, 20 nt, Artificial Sequence
  LDLR targeting guide sequence portion
aauugccaaucccuugugac

SEQ ID NO: 256 - RNA, 20 nt, Artificial Sequence
  LDLR targeting guide sequence portion
aauuguccccagggacaaaa

SEQ ID NO: 257 - RNA, 20 nt, Artificial Sequence
  LDLR targeting guide sequence portion
aauuuggccagacacaggug

SEQ ID NO: 258 - RNA, 20 nt, Artificial Sequence
  LDLR targeting guide sequence portion
acaaaaaauccccacuaucu

SEQ ID NO: 259 - RNA, 20 nt, Artificial Sequence
  LDLR targeting guide sequence portion
acaaaaaccuucuauacagu

SEQ ID NO: 260 - RNA, 20 nt, Artificial Sequence
  LDLR targeting guide sequence portion
acaaacccaccucgaaagac

SEQ ID NO: 261 - RNA, 20 nt, Artificial Sequence
  LDLR targeting guide sequence portion
acaaagauuauuugcacgaa

SEQ ID NO: 262 - RNA, 20 nt, Artificial Sequence
  LDLR targeting guide sequence portion
acaaagcucuggcaggcaau

SEQ ID NO: 263 - RNA, 20 nt, Artificial Sequence
  LDLR targeting guide sequence portion
acaaauacagcaaccagggu

SEQ ID NO: 264 - RNA, 20 nt, Artificial Sequence
  LDLR targeting guide sequence portion
acaaaugccaaauguacaca

SEQ ID NO: 265 - RNA, 20 nt, Artificial Sequence
  LDLR targeting guide sequence portion
acaacagcagauggcaccaa

SEQ ID NO: 266 - RNA, 20 nt, Artificial Sequence
  LDLR targeting guide sequence portion
acaacggggacaucauucuc

SEQ ID NO: 267 - RNA, 20 nt, Artificial Sequence
  LDLR targeting guide sequence portion
acaacucugaacugagaaag

SEQ ID NO: 268 - RNA, 20 nt, Artificial Sequence
  LDLR targeting guide sequence portion
acaagauuggggaagugaau

SEQ ID NO: 269 - RNA, 20 nt, Artificial Sequence
  LDLR targeting guide sequence portion
acaaggccggcgaggucuca

SEQ ID NO: 270 - RNA, 20 nt, Artificial Sequence
  LDLR targeting guide sequence portion
acaagggauuggcaauuguc

SEQ ID NO: 271 - RNA, 20 nt, Artificial Sequence
  LDLR targeting guide sequence portion
acaauccucaaacauggaag

SEQ ID NO: 272 - RNA, 20 nt, Artificial Sequence
  LDLR targeting guide sequence portion
acaauggcaguucucgauau

SEQ ID NO: 273 - RNA, 20 nt, Artificial Sequence
  LDLR targeting guide sequence portion
acaauugccaaucccuugug

SEQ ID NO: 274 - RNA, 20 nt, Artificial Sequence
  LDLR targeting guide sequence portion
acacaaaugccaaauguaca

SEQ ID NO: 275 - RNA, 20 nt, Artificial Sequence
  LDLR targeting guide sequence portion
acacaacagcagauggcacc

SEQ ID NO: 276 - RNA, 20 nt, Artificial Sequence
  LDLR targeting guide sequence portion
acacaauccucaaacaugga

SEQ ID NO: 277 - RNA, 20 nt, Artificial Sequence
  LDLR targeting guide sequence portion
acacacaacagcagauggca

SEQ ID NO: 278 - RNA, 20 nt, Artificial Sequence
  LDLR targeting guide sequence portion
acacacacgacagaaaacag

SEQ ID NO: 279 - RNA, 20 nt, Artificial Sequence
  LDLR targeting guide sequence portion
acacacgacagaaaacagug

SEQ ID NO: 280 - RNA, 20 nt, Artificial Sequence
  LDLR targeting guide sequence portion
acacagggccccgagaauag

SEQ ID NO: 281 - RNA, 20 nt, Artificial Sequence
  LDLR targeting guide sequence portion
acacaggugccucacgccug

SEQ ID NO: 282 - RNA, 20 nt, Artificial Sequence
  LDLR targeting guide sequence portion
acacaguccaguucgugcaa

SEQ ID NO: 283 - RNA, 20 nt, Artificial Sequence
  LDLR targeting guide sequence portion
acacaguguacaacucugaa

SEQ ID NO: 284 - RNA, 20 nt, Artificial Sequence
  LDLR targeting guide sequence portion
acacaguguuuugucccugg

SEQ ID NO: 285 - RNA, 20 nt, Artificial Sequence
  LDLR targeting guide sequence portion
acacauacccaucaacgaca

SEQ ID NO: 286 - RNA, 20 nt, Artificial Sequence
  LDLR targeting guide sequence portion
acaccagccuggugcccauc

SEQ ID NO: 287 - RNA, 20 nt, Artificial Sequence
  LDLR targeting guide sequence portion
acacccaucucccagaagcc

SEQ ID NO: 288 - RNA, 20 nt, Artificial Sequence
  LDLR targeting guide sequence portion
acacccgguuaccuuggccg

SEQ ID NO: 289 - RNA, 20 nt, Artificial Sequence
  LDLR targeting guide sequence portion
acaccuccauuucucuccag

SEQ ID NO: 290 - RNA, 20 nt, Artificial Sequence
  LDLR targeting guide sequence portion
acaccugggugcaggccacg

SEQ ID NO: 291 - RNA, 20 nt, Artificial Sequence
  LDLR targeting guide sequence portion
acacgacagaaaacagugca

SEQ ID NO: 292 - RNA, 20 nt, Artificial Sequence
  LDLR targeting guide sequence portion
acacggcgauuucagaaaga

SEQ ID NO: 293 - RNA, 20 nt, Artificial Sequence
  LDLR targeting guide sequence portion
acacgggcuuucccuggccu

SEQ ID NO: 294 - RNA, 20 nt, Artificial Sequence
  LDLR targeting guide sequence portion
acacguggccugcacccagg

SEQ ID NO: 295 - RNA, 20 nt, Artificial Sequence
  LDLR targeting guide sequence portion
acacguugacuccugaguuu

SEQ ID NO: 296 - RNA, 20 nt, Artificial Sequence
  LDLR targeting guide sequence portion
acacugggugggucaugauu

SEQ ID NO: 297 - RNA, 20 nt, Artificial Sequence
  LDLR targeting guide sequence portion
acacuguguacauuuggcau

SEQ ID NO: 298 - RNA, 20 nt, Artificial Sequence
  LDLR targeting guide sequence portion
acagagaagaccaaagcauu

SEQ ID NO: 299 - RNA, 20 nt, Artificial Sequence
  LDLR targeting guide sequence portion
acagagaggggcagguugac

SEQ ID NO: 300 - RNA, 20 nt, Artificial Sequence
  LDLR targeting guide sequence portion
acagauaguggggauuuuuu

SEQ ID NO: 301 - RNA, 20 nt, Artificial Sequence
  LDLR targeting guide sequence portion
acagaugaagacccuauuuc

SEQ ID NO: 302 - RNA, 20 nt, Artificial Sequence
  LDLR targeting guide sequence portion
acagauggucagucuggagg

SEQ ID NO: 303 - RNA, 20 nt, Artificial Sequence
  LDLR targeting guide sequence portion
acagcaaccaggguuugcaa

SEQ ID NO: 304 - RNA, 20 nt, Artificial Sequence
  LDLR targeting guide sequence portion
acagcagauggcaccaacgg

SEQ ID NO: 305 - RNA, 20 nt, Artificial Sequence
  LDLR targeting guide sequence portion
acagccacaccugggugcag

SEQ ID NO: 306 - RNA, 20 nt, Artificial Sequence
  LDLR targeting guide sequence portion
acagccagguuagccuuugc

SEQ ID NO: 307 - RNA, 20 nt, Artificial Sequence
  LDLR targeting guide sequence portion
acagccucaaaugccugagc

SEQ ID NO: 308 - RNA, 20 nt, Artificial Sequence
  LDLR targeting guide sequence portion
acagccuccgucagacuccc

SEQ ID NO: 309 - RNA, 20 nt, Artificial Sequence
  LDLR targeting guide sequence portion
acaggcccggggggaccagg

SEQ ID NO: 310 - RNA, 20 nt, Artificial Sequence
  LDLR targeting guide sequence portion
acaggcgugaggcaccugug

SEQ ID NO: 311 - RNA, 20 nt, Artificial Sequence
  LDLR targeting guide sequence portion
acaggcuucggacagugccc

SEQ ID NO: 312 - RNA, 20 nt, Artificial Sequence
  LDLR targeting guide sequence portion
acagggacgcauuuacgugc

SEQ ID NO: 313 - RNA, 20 nt, Artificial Sequence
  LDLR targeting guide sequence portion
acagggcaaaggcuaaccug

SEQ ID NO: 314 - RNA, 20 nt, Artificial Sequence
  LDLR targeting guide sequence portion
acagggccccgagaauaguc

SEQ ID NO: 315 - RNA, 20 nt, Artificial Sequence
  LDLR targeting guide sequence portion
acaggugccucacgccugua

SEQ ID NO: 316 - RNA, 20 nt, Artificial Sequence
  LDLR targeting guide sequence portion
acaguaacacggcgauuuca

SEQ ID NO: 317 - RNA, 20 nt, Artificial Sequence
  LDLR targeting guide sequence portion
acaguaagacauucaggcua

SEQ ID NO: 318 - RNA, 20 nt, Artificial Sequence
  LDLR targeting guide sequence portion
acaguccaguucgugcaaau

SEQ ID NO: 319 - RNA, 20 nt, Artificial Sequence
  LDLR targeting guide sequence portion
acagugacagccuccgucag

SEQ ID NO: 320 - RNA, 20 nt, Artificial Sequence
  LDLR targeting guide sequence portion
acagugcaaaauaauaacac

SEQ ID NO: 321 - RNA, 20 nt, Artificial Sequence
  LDLR targeting guide sequence portion
acagugcccaugcaauggcu

SEQ ID NO: 322 - RNA, 20 nt, Artificial Sequence
  LDLR targeting guide sequence portion
acagugguuuaaaaagugac

SEQ ID NO: 323 - RNA, 20 nt, Artificial Sequence
  LDLR targeting guide sequence portion
acaguguacaacucugaacu

SEQ ID NO: 324 - RNA, 20 nt, Artificial Sequence
  LDLR targeting guide sequence portion
acaguguuuugucccugggg

SEQ ID NO: 325 - RNA, 20 nt, Artificial Sequence
  LDLR targeting guide sequence portion
acaguuucaaccaauauaca

SEQ ID NO: 326 - RNA, 20 nt, Artificial Sequence
  LDLR targeting guide sequence portion
acauaaagaagaggcauuuc

SEQ ID NO: 327 - RNA, 20 nt, Artificial Sequence
  LDLR targeting guide sequence portion
acauaaagacgacaauggca

SEQ ID NO: 328 - RNA, 20 nt, Artificial Sequence
  LDLR targeting guide sequence portion
acauaacaaaaaauccccac

SEQ ID NO: 329 - RNA, 20 nt, Artificial Sequence
  LDLR targeting guide sequence portion
acauacaacggggacaucau

SEQ ID NO: 330 - RNA, 20 nt, Artificial Sequence
  LDLR targeting guide sequence portion
acauacccaucaacgacaag

SEQ ID NO: 331 - RNA, 20 nt, Artificial Sequence
  LDLR targeting guide sequence portion
acaucagugcaacaguaaca

SEQ ID NO: 332 - RNA, 20 nt, Artificial Sequence
  LDLR targeting guide sequence portion
acaucauucucccaaaaagc

SEQ ID NO: 333 - RNA, 20 nt, Artificial Sequence
  LDLR targeting guide sequence portion
acauccccuccccuuucauc

SEQ ID NO: 334 - RNA, 20 nt, Artificial Sequence
  LDLR targeting guide sequence portion
acaucugccuggagucccgu

SEQ ID NO: 335 - RNA, 20 nt, Artificial Sequence
  LDLR targeting guide sequence portion
acaucuucacgcgggagucu

SEQ ID NO: 336 - RNA, 20 nt, Artificial Sequence
  LDLR targeting guide sequence portion
acaugcacggugaggccggg

SEQ ID NO: 337 - RNA, 20 nt, Artificial Sequence
  LDLR targeting guide sequence portion
acauggaagaugaaagggga

SEQ ID NO: 338 - RNA, 20 nt, Artificial Sequence
  LDLR targeting guide sequence portion
acauucaggcuacaaaaacc

SEQ ID NO: 339 - RNA, 20 nt, Artificial Sequence
  LDLR targeting guide sequence portion
accaaaaaguuaaaaaucag

SEQ ID NO: 340 - RNA, 20 nt, Artificial Sequence
  LDLR targeting guide sequence portion
accaaaaucccaacccaagc

SEQ ID NO: 341 - RNA, 20 nt, Artificial Sequence
  LDLR targeting guide sequence portion
accaaagcauugccugccag

SEQ ID NO: 342 - RNA, 20 nt, Artificial Sequence
  LDLR targeting guide sequence portion
accaaaugaugccacuuccc

SEQ ID NO: 343 - RNA, 20 nt, Artificial Sequence
  LDLR targeting guide sequence portion
accaacgggacccccuggcc

SEQ ID NO: 344 - RNA, 20 nt, Artificial Sequence
  LDLR targeting guide sequence portion
accaauauacaaagugcaaa

SEQ ID NO: 345 - RNA, 20 nt, Artificial Sequence
  LDLR targeting guide sequence portion
accaaucucuaagccaaacc

SEQ ID NO: 346 - RNA, 20 nt, Artificial Sequence
  LDLR targeting guide sequence portion
accacggauucagccagauc

SEQ ID NO: 347 - RNA, 20 nt, Artificial Sequence
  LDLR targeting guide sequence portion
accacgggaauggaaguggg

SEQ ID NO: 348 - RNA, 20 nt, Artificial Sequence
  LDLR targeting guide sequence portion
accacuguauagaagguuuu

SEQ ID NO: 349 - RNA, 20 nt, Artificial Sequence
  LDLR targeting guide sequence portion
accagaaaggcuuaucacgg

SEQ ID NO: 350 - RNA, 20 nt, Artificial Sequence
  LDLR targeting guide sequence portion
accagccuggugcccauccu

SEQ ID NO: 351 - RNA, 20 nt, Artificial Sequence
  LDLR targeting guide sequence portion
accaggaugacaccuccauu

SEQ ID NO: 352 - RNA, 20 nt, Artificial Sequence
  LDLR targeting guide sequence portion
accaggccugagcaacaaag

SEQ ID NO: 353 - RNA, 20 nt, Artificial Sequence
  LDLR targeting guide sequence portion
accaggcugguguccugaca

SEQ ID NO: 354 - RNA, 20 nt, Artificial Sequence
  LDLR targeting guide sequence portion
accaggguuugcaaaaauaa

SEQ ID NO: 355 - RNA, 20 nt, Artificial Sequence
  LDLR targeting guide sequence portion
accagugacucaggcucugc

SEQ ID NO: 356 - RNA, 20 nt, Artificial Sequence
  LDLR targeting guide sequence portion
accauccucccaccucagcc

SEQ ID NO: 357 - RNA, 20 nt, Artificial Sequence
  LDLR targeting guide sequence portion
accaugcauggugcaucagc

SEQ ID NO: 358 - RNA, 20 nt, Artificial Sequence
  LDLR targeting guide sequence portion
acccaagccauugcaugggc

SEQ ID NO: 359 - RNA, 20 nt, Artificial Sequence
  LDLR targeting guide sequence portion
acccacccagugucuuucga

SEQ ID NO: 360 - RNA, 20 nt, Artificial Sequence
  LDLR targeting guide sequence portion
acccaccucgaaagacacug

SEQ ID NO: 361 - RNA, 20 nt, Artificial Sequence
  LDLR targeting guide sequence portion
acccacuuccauucccgugg

SEQ ID NO: 362 - RNA, 20 nt, Artificial Sequence
  LDLR targeting guide sequence portion
acccagcugauuuuuaacuu

SEQ ID NO: 363 - RNA, 20 nt, Artificial Sequence
  LDLR targeting guide sequence portion
acccagguguggcugucagg

SEQ ID NO: 364 - RNA, 20 nt, Artificial Sequence
  LDLR targeting guide sequence portion
acccagugucuuucgaggug

SEQ ID NO: 365 - RNA, 20 nt, Artificial Sequence
  LDLR targeting guide sequence portion
acccaucaacgacaagauug

SEQ ID NO: 366 - RNA, 20 nt, Artificial Sequence
  LDLR targeting guide sequence portion
acccaucucccagaagccac

SEQ ID NO: 367 - RNA, 20 nt, Artificial Sequence
  LDLR targeting guide sequence portion
accccaucucuuaaaaaaug

SEQ ID NO: 368 - RNA, 20 nt, Artificial Sequence
  LDLR targeting guide sequence portion
acccccgaaucaugacccac

SEQ ID NO: 369 - RNA, 20 nt, Artificial Sequence
  LDLR targeting guide sequence portion
acccccuacacagggccccg

SEQ ID NO: 370 - RNA, 20 nt, Artificial Sequence
  LDLR targeting guide sequence portion
acccccuggcccugccucau

SEQ ID NO: 371 - RNA, 20 nt, Artificial Sequence
  LDLR targeting guide sequence portion
accccuaaacucaggaguca

SEQ ID NO: 372 - RNA, 20 nt, Artificial Sequence
  LDLR targeting guide sequence portion
acccgguuaccuuggccgug

SEQ ID NO: 373 - RNA, 20 nt, Artificial Sequence
  LDLR targeting guide sequence portion
acccugguugcuguauuugu

SEQ ID NO: 374 - RNA, 20 nt, Artificial Sequence
  LDLR targeting guide sequence portion
acccuuaauauuuauuaagu

SEQ ID NO: 375 - RNA, 20 nt, Artificial Sequence
  LDLR targeting guide sequence portion
acccuuccugagaccucgcc

SEQ ID NO: 376 - RNA, 20 nt, Artificial Sequence
  LDLR targeting guide sequence portion
accgggacuucaaagccgug

SEQ ID NO: 377 - RNA, 20 nt, Artificial Sequence
  LDLR targeting guide sequence portion
accgggugucucaggcacuu

SEQ ID NO: 378 - RNA, 20 nt, Artificial Sequence
  LDLR targeting guide sequence portion
accguacccagcugauuuuu

SEQ ID NO: 379 - RNA, 20 nt, Artificial Sequence
  LDLR targeting guide sequence portion
accgugacacaauccucaaa

SEQ ID NO: 380 - RNA, 20 nt, Artificial Sequence
  LDLR targeting guide sequence portion
accgugauaagccuuucugg

SEQ ID NO: 381 - RNA, 20 nt, Artificial Sequence
  LDLR targeting guide sequence portion
accgugcauguuuuaaacac

SEQ ID NO: 382 - RNA, 20 nt, Artificial Sequence
  LDLR targeting guide sequence portion
accuagugcuuccacuucua

SEQ ID NO: 383 - RNA, 20 nt, Artificial Sequence
  LDLR targeting guide sequence portion
accucagccucgccaugccu

SEQ ID NO: 384 - RNA, 20 nt, Artificial Sequence
  LDLR targeting guide sequence portion
accuccauuucucuccagga

SEQ ID NO: 385 - RNA, 20 nt, Artificial Sequence
  LDLR targeting guide sequence portion
accucgaaagacacugggug

SEQ ID NO: 386 - RNA, 20 nt, Artificial Sequence
  LDLR targeting guide sequence portion
accucgccggccuuguuuua

SEQ ID NO: 387 - RNA, 20 nt, Artificial Sequence
  LDLR targeting guide sequence portion
accucuucuaugcaagccuu

SEQ ID NO: 388 - RNA, 20 nt, Artificial Sequence
  LDLR targeting guide sequence portion
accugaagucccgucaaacg

SEQ ID NO: 389 - RNA, 20 nt, Artificial Sequence
  LDLR targeting guide sequence portion
accugccccucucugucccc

SEQ ID NO: 390 - RNA, 20 nt, Artificial Sequence
  LDLR targeting guide sequence portion
accuggcugucuagcaaggc

SEQ ID NO: 391 - RNA, 20 nt, Artificial Sequence
  LDLR targeting guide sequence portion
accugggugcaggccacgug

SEQ ID NO: 392 - RNA, 20 nt, Artificial Sequence
  LDLR targeting guide sequence portion
accugugucuggccaaauuc

SEQ ID NO: 393 - RNA, 20 nt, Artificial Sequence
  LDLR targeting guide sequence portion
accuuccuuaagccaggaaa

SEQ ID NO: 394 - RNA, 20 nt, Artificial Sequence
  LDLR targeting guide sequence portion
accuucuauacagugguuua

SEQ ID NO: 395 - RNA, 20 nt, Artificial Sequence
  LDLR targeting guide sequence portion
accuuggccgugaggacacg

SEQ ID NO: 396 - RNA, 20 nt, Artificial Sequence
  LDLR targeting guide sequence portion
acgaacuggacugugugcaa

SEQ ID NO: 397 - RNA, 20 nt, Artificial Sequence
  LDLR targeting guide sequence portion
acgacaagauuggggaagug

SEQ ID NO: 398 - RNA, 20 nt, Artificial Sequence
  LDLR targeting guide sequence portion
acgacaauggcaguucucga

SEQ ID NO: 399 - RNA, 20 nt, Artificial Sequence
  LDLR targeting guide sequence portion
acgacagaaaacagugcaaa

SEQ ID NO: 400 - RNA, 20 nt, Artificial Sequence
  LDLR targeting guide sequence portion
acgacagccucaaaugccug

SEQ ID NO: 401 - RNA, 20 nt, Artificial Sequence
  LDLR targeting guide sequence portion
acgaggaaaggaagaaacca

SEQ ID NO: 402 - RNA, 20 nt, Artificial Sequence
  LDLR targeting guide sequence portion
acgaucacggcuuugaaguc

SEQ ID NO: 403 - RNA, 20 nt, Artificial Sequence
  LDLR targeting guide sequence portion
acgauccagacuggaggauu

SEQ ID NO: 404 - RNA, 20 nt, Artificial Sequence
  LDLR targeting guide sequence portion
acgcauuuacgugcuccgaa

SEQ ID NO: 405 - RNA, 20 nt, Artificial Sequence
  LDLR targeting guide sequence portion
acgccacgucauccuccaga

SEQ ID NO: 406 - RNA, 20 nt, Artificial Sequence
  LDLR targeting guide sequence portion
acgccaugaaucccuuuccu

SEQ ID NO: 407 - RNA, 20 nt, Artificial Sequence
  LDLR targeting guide sequence portion
acgcgggagucugacggagg

SEQ ID NO: 408 - RNA, 20 nt, Artificial Sequence
  LDLR targeting guide sequence portion
acgcuuuuugggagaaugau

SEQ ID NO: 409 - RNA, 20 nt, Artificial Sequence
  LDLR targeting guide sequence portion
acggaggcugucacugucuc

SEQ ID NO: 410 - RNA, 20 nt, Artificial Sequence
  LDLR targeting guide sequence portion
acggauucagccagaucauu

SEQ ID NO: 411 - RNA, 20 nt, Artificial Sequence
  LDLR targeting guide sequence portion
acggccaagguaaccgggug

SEQ ID NO: 412 - RNA, 20 nt, Artificial Sequence
  LDLR targeting guide sequence portion
acggcgauuucagaaagaac

SEQ ID NO: 413 - RNA, 20 nt, Artificial Sequence
  LDLR targeting guide sequence portion
acggcuuugaagucccgguc

SEQ ID NO: 414 - RNA, 20 nt, Artificial Sequence
  LDLR targeting guide sequence portion
acgggaauggaaguggguag

SEQ ID NO: 415 - RNA, 20 nt, Artificial Sequence
  LDLR targeting guide sequence portion
acgggacccccuggcccugc

SEQ ID NO: 416 - RNA, 20 nt, Artificial Sequence
  LDLR targeting guide sequence portion
acgggacuccaggcagaugu

SEQ ID NO: 417 - RNA, 20 nt, Artificial Sequence
  LDLR targeting guide sequence portion
acgggacuucagguucuuuc

SEQ ID NO: 418 - RNA, 20 nt, Artificial Sequence
  LDLR targeting guide sequence portion
acgggcuuucccuggccugg

SEQ ID NO: 419 - RNA, 20 nt, Artificial Sequence
  LDLR targeting guide sequence portion
acggggacaucauucuccca

SEQ ID NO: 420 - RNA, 20 nt, Artificial Sequence
  LDLR targeting guide sequence portion
acggugaggccgggcgcagu

SEQ ID NO: 421 - RNA, 20 nt, Artificial Sequence
  LDLR targeting guide sequence portion
acgguggagagaaacucaaa

SEQ ID NO: 422 - RNA, 20 nt, Artificial Sequence
  LDLR targeting guide sequence portion
acguaaaugcgucccuguac

SEQ ID NO: 423 - RNA, 20 nt, Artificial Sequence
  LDLR targeting guide sequence portion
acgucauccuccagacugac

SEQ ID NO: 424 - RNA, 20 nt, Artificial Sequence
  LDLR targeting guide sequence portion
acgugccaccguacccagcu

SEQ ID NO: 425 - RNA, 20 nt, Artificial Sequence
  LDLR targeting guide sequence portion
acgugcuccgaaaccagaaa

SEQ ID NO: 426 - RNA, 20 nt, Artificial Sequence
  LDLR targeting guide sequence portion
acguggccugcacccaggug

SEQ ID NO: 427 - RNA, 20 nt, Artificial Sequence
  LDLR targeting guide sequence portion
acguggcgugaacaucugcc

SEQ ID NO: 428 - RNA, 20 nt, Artificial Sequence
  LDLR targeting guide sequence portion
acguguccucacggccaagg

SEQ ID NO: 429 - RNA, 20 nt, Artificial Sequence
  LDLR targeting guide sequence portion
acguguuuaccucuucuaug

SEQ ID NO: 430 - RNA, 20 nt, Artificial Sequence
  LDLR targeting guide sequence portion
acguugacuccugaguuuag

SEQ ID NO: 431 - RNA, 20 nt, Artificial Sequence
  LDLR targeting guide sequence portion
acuaggugggcggacauaaa

SEQ ID NO: 432 - RNA, 20 nt, Artificial Sequence
  LDLR targeting guide sequence portion
acuaucuguacagggacgca

SEQ ID NO: 433 - RNA, 20 nt, Artificial Sequence
  LDLR targeting guide sequence portion
acuauucucggggcccugug

SEQ ID NO: 434 - RNA, 20 nt, Artificial Sequence
  LDLR targeting guide sequence portion
acucaaaacuuccuggagag

SEQ ID NO: 435 - RNA, 20 nt, Artificial Sequence
  LDLR targeting guide sequence portion
acucaagugauccagcucag

SEQ ID NO: 436 - RNA, 20 nt, Artificial Sequence
  LDLR targeting guide sequence portion
acucaggagucaacguguuu

SEQ ID NO: 437 - RNA, 20 nt, Artificial Sequence
  LDLR targeting guide sequence portion
acucaggcucugccucuggg

SEQ ID NO: 438 - RNA, 20 nt, Artificial Sequence
  LDLR targeting guide sequence portion
acucauacauacaacgggga

SEQ ID NO: 439 - RNA, 20 nt, Artificial Sequence
  LDLR targeting guide sequence portion
acucauucaccaaaugaugc

SEQ ID NO: 440 - RNA, 20 nt, Artificial Sequence
  LDLR targeting guide sequence portion
acuccaggcagauguucacg

SEQ ID NO: 441 - RNA, 20 nt, Artificial Sequence
  LDLR targeting guide sequence portion
acucccgcgugaagauguca

SEQ ID NO: 442 - RNA, 20 nt, Artificial Sequence
  LDLR targeting guide sequence portion
acuccugaacucaagugauc

SEQ ID NO: 443 - RNA, 20 nt, Artificial Sequence
  LDLR targeting guide sequence portion
acuccugaguuuagggguuu

SEQ ID NO: 444 - RNA, 20 nt, Artificial Sequence
  LDLR targeting guide sequence portion
acucugaacugagaaagugc

SEQ ID NO: 445 - RNA, 20 nt, Artificial Sequence
  LDLR targeting guide sequence portion
acugaacaaauacagcaacc

SEQ ID NO: 446 - RNA, 20 nt, Artificial Sequence
  LDLR targeting guide sequence portion
acugagaaagugcaaggaga

SEQ ID NO: 447 - RNA, 20 nt, Artificial Sequence
  LDLR targeting guide sequence portion
acugauguccggagagacag

SEQ ID NO: 448 - RNA, 20 nt, Artificial Sequence
  LDLR targeting guide sequence portion
acugccauugucgucuuuau

SEQ ID NO: 449 - RNA, 20 nt, Artificial Sequence
  LDLR targeting guide sequence portion
acugcgcccggccucaccgu

SEQ ID NO: 450 - RNA, 20 nt, Artificial Sequence
  LDLR targeting guide sequence portion
acuggacugugugcaacgcu

SEQ ID NO: 451 - RNA, 20 nt, Artificial Sequence
  LDLR targeting guide sequence portion
acugggugggucaugauucg

SEQ ID NO: 452 - RNA, 20 nt, Artificial Sequence
  LDLR targeting guide sequence portion
acuggucacccuuaauauuu

SEQ ID NO: 453 - RNA, 20 nt, Artificial Sequence
  LDLR targeting guide sequence portion
acuguauagaagguuuuugu

SEQ ID NO: 454 - RNA, 20 nt, Artificial Sequence
  LDLR targeting guide sequence portion
acuguccgaagccuguucug

SEQ ID NO: 455 - RNA, 20 nt, Artificial Sequence
  LDLR targeting guide sequence portion
acugucucuccggacaucag

SEQ ID NO: 456 - RNA, 20 nt, Artificial Sequence
  LDLR targeting guide sequence portion
acuguguacauuuggcauuu

SEQ ID NO: 457 - RNA, 20 nt, Artificial Sequence
  LDLR targeting guide sequence portion
acugugugcaacgcuuuuug

SEQ ID NO: 458 - RNA, 20 nt, Artificial Sequence
  LDLR targeting guide sequence portion
acuguugcacugauguccgg

SEQ ID NO: 459 - RNA, 20 nt, Artificial Sequence
  LDLR targeting guide sequence portion
acuguuuucugucgugugug

SEQ ID NO: 460 - RNA, 20 nt, Artificial Sequence
  LDLR targeting guide sequence portion
acuuaauaaauauuaagggu

SEQ ID NO: 461 - RNA, 20 nt, Artificial Sequence
  LDLR targeting guide sequence portion
acuucaaagccgugaucgug

SEQ ID NO: 462 - RNA, 20 nt, Artificial Sequence
  LDLR targeting guide sequence portion
acuucagguucuuucugaaa

SEQ ID NO: 463 - RNA, 20 nt, Artificial Sequence
  LDLR targeting guide sequence portion
acuuccauucccguggucuc

SEQ ID NO: 464 - RNA, 20 nt, Artificial Sequence
  LDLR targeting guide sequence portion
acuucccagaggcagagccu

SEQ ID NO: 465 - RNA, 20 nt, Artificial Sequence
  LDLR targeting guide sequence portion
acuuccccaaucuugucguu

SEQ ID NO: 466 - RNA, 20 nt, Artificial Sequence
  LDLR targeting guide sequence portion
acuuccuggagagaaaugga

SEQ ID NO: 467 - RNA, 20 nt, Artificial Sequence
  LDLR targeting guide sequence portion
acuucuaugcaaaugccucc

SEQ ID NO: 468 - RNA, 20 nt, Artificial Sequence
  LDLR targeting guide sequence portion
acuugcuucucugggccuga

SEQ ID NO: 469 - RNA, 20 nt, Artificial Sequence
  LDLR targeting guide sequence portion
acuuugggaggcugagcugg

SEQ ID NO: 470 - RNA, 20 nt, Artificial Sequence
  LDLR targeting guide sequence portion
acuuuuuaaaccacuguaua

SEQ ID NO: 471 - RNA, 20 nt, Artificial Sequence
  LDLR targeting guide sequence portion
acuuuuugguuuuuguagag

SEQ ID NO: 472 - RNA, 20 nt, Artificial Sequence
  LDLR targeting guide sequence portion
agaaacaggcccggggggac

SEQ ID NO: 473 - RNA, 20 nt, Artificial Sequence
  LDLR targeting guide sequence portion
agaaaccaaaaucccaaccc

SEQ ID NO: 474 - RNA, 20 nt, Artificial Sequence
  LDLR targeting guide sequence portion
agaaacucaaaacuuccugg

SEQ ID NO: 475 - RNA, 20 nt, Artificial Sequence
  LDLR targeting guide sequence portion
agaaagaaccugaagucccg

SEQ ID NO: 476 - RNA, 20 nt, Artificial Sequence
  LDLR targeting guide sequence portion
agaaaggcuuaucacgguuc

SEQ ID NO: 477 - RNA, 20 nt, Artificial Sequence
  LDLR targeting guide sequence portion
agaaagugcaaggagaccac

SEQ ID NO: 478 - RNA, 20 nt, Artificial Sequence
  LDLR targeting guide sequence portion
agaaauggaggugucauccu

SEQ ID NO: 479 - RNA, 20 nt, Artificial Sequence
  LDLR targeting guide sequence portion
agaacaggcuucggacagug

SEQ ID NO: 480 - RNA, 20 nt, Artificial Sequence
  LDLR targeting guide sequence portion
agaacccuuccugagaccuc

SEQ ID NO: 481 - RNA, 20 nt, Artificial Sequence
  LDLR targeting guide sequence portion
agaaccugaagucccgucaa

SEQ ID NO: 482 - RNA, 20 nt, Artificial Sequence
  LDLR targeting guide sequence portion
agaacugccauugucgucuu

SEQ ID NO: 483 - RNA, 20 nt, Artificial Sequence
  LDLR targeting guide sequence portion
agaagaccaaagcauugccu

SEQ ID NO: 484 - RNA, 20 nt, Artificial Sequence
  LDLR targeting guide sequence portion
agaagaggcauuucagaggc

SEQ ID NO: 485 - RNA, 20 nt, Artificial Sequence
  LDLR targeting guide sequence portion
agaagagguaaacacguuga

SEQ ID NO: 486 - RNA, 20 nt, Artificial Sequence
  LDLR targeting guide sequence portion
agaagcaaguggcuuucaac

SEQ ID NO: 487 - RNA, 20 nt, Artificial Sequence
  LDLR targeting guide sequence portion
agaagccacucauacauaca

SEQ ID NO: 488 - RNA, 20 nt, Artificial Sequence
  LDLR targeting guide sequence portion
agaagguuuuuguagccuga

SEQ ID NO: 489 - RNA, 20 nt, Artificial Sequence
  LDLR targeting guide sequence portion
agaaguggaagcacuaggug

SEQ ID NO: 490 - RNA, 20 nt, Artificial Sequence
  LDLR targeting guide sequence portion
agaauagucacugaacaaau

SEQ ID NO: 491 - RNA, 20 nt, Artificial Sequence
  LDLR targeting guide sequence portion
agaaugauguccccguugua

SEQ ID NO: 492 - RNA, 20 nt, Artificial Sequence
  LDLR targeting guide sequence portion
agacacaggugccucacgcc

SEQ ID NO: 493 - RNA, 20 nt, Artificial Sequence
  LDLR targeting guide sequence portion
agacacccgguuaccuuggc

SEQ ID NO: 494 - RNA, 20 nt, Artificial Sequence
  LDLR targeting guide sequence portion
agacacugggugggucauga

SEQ ID NO: 495 - RNA, 20 nt, Artificial Sequence
  LDLR targeting guide sequence portion
agacagagaagaccaaagca

SEQ ID NO: 496 - RNA, 20 nt, Artificial Sequence
  LDLR targeting guide sequence portion
agacagauggucagucugga

SEQ ID NO: 497 - RNA, 20 nt, Artificial Sequence
  LDLR targeting guide sequence portion
agacagccagguuagccuuu

SEQ ID NO: 498 - RNA, 20 nt, Artificial Sequence
  LDLR targeting guide sequence portion
agacagugacagccuccguc

SEQ ID NO: 499 - RNA, 20 nt, Artificial Sequence
  LDLR targeting guide sequence portion
agacauucaggcuacaaaaa

SEQ ID NO: 500 - RNA, 20 nt, Artificial Sequence
  LDLR targeting guide sequence portion
agaccaaacucauucaccaa

SEQ ID NO: 501 - RNA, 20 nt, Artificial Sequence
  LDLR targeting guide sequence portion
agaccaaagcauugccugcc

SEQ ID NO: 502 - RNA, 20 nt, Artificial Sequence
  LDLR targeting guide sequence portion
agaccacgggaauggaagug

SEQ ID NO: 503 - RNA, 20 nt, Artificial Sequence
  LDLR targeting guide sequence portion
agaccaggccugagcaacaa

SEQ ID NO: 504 - RNA, 20 nt, Artificial Sequence
  LDLR targeting guide sequence portion
agaccccaucucuuaaaaaa

SEQ ID NO: 505 - RNA, 20 nt, Artificial Sequence
  LDLR targeting guide sequence portion
agacccuauuucagaaauac

SEQ ID NO: 506 - RNA, 20 nt, Artificial Sequence
  LDLR targeting guide sequence portion
agaccucgccggccuuguuu

SEQ ID NO: 507 - RNA, 20 nt, Artificial Sequence
  LDLR targeting guide sequence portion
agacgacaauggcaguucuc

SEQ ID NO: 508 - RNA, 20 nt, Artificial Sequence
  LDLR targeting guide sequence portion
agacucccgcgugaagaugu

SEQ ID NO: 509 - RNA, 20 nt, Artificial Sequence
  LDLR targeting guide sequence portion
agagaaacaggcccgggggg

SEQ ID NO: 510 - RNA, 20 nt, Artificial Sequence
  LDLR targeting guide sequence portion
agagaaacucaaaacuuccu

SEQ ID NO: 511 - RNA, 20 nt, Artificial Sequence
  LDLR targeting guide sequence portion
agagaaauggaggugucauc

SEQ ID NO: 512 - RNA, 20 nt, Artificial Sequence
  LDLR targeting guide sequence portion
agagaagaccaaagcauugc

SEQ ID NO: 513 - RNA, 20 nt, Artificial Sequence
  LDLR targeting guide sequence portion
agagaagcaaguggcuuuca

SEQ ID NO: 514 - RNA, 20 nt, Artificial Sequence
  LDLR targeting guide sequence portion
agagacagugacagccuccg

SEQ ID NO: 515 - RNA, 20 nt, Artificial Sequence
  LDLR targeting guide sequence portion
agagaggggcagguugaccg

SEQ ID NO: 516 - RNA, 20 nt, Artificial Sequence
  LDLR targeting guide sequence portion
agagaugggaucucgcuuug

SEQ ID NO: 517 - RNA, 20 nt, Artificial Sequence
  LDLR targeting guide sequence portion
agagauugguggaugaggca

SEQ ID NO: 518 - RNA, 20 nt, Artificial Sequence
  LDLR targeting guide sequence portion
agagccugagucacugguca

SEQ ID NO: 519 - RNA, 20 nt, Artificial Sequence
  LDLR targeting guide sequence portion
agaggcaauaacccccuaca

SEQ ID NO: 520 - RNA, 20 nt, Artificial Sequence
  LDLR targeting guide sequence portion
agaggcagagccugagucac

SEQ ID NO: 521 - RNA, 20 nt, Artificial Sequence
  LDLR targeting guide sequence portion
agaggcauuucagaggcaau

SEQ ID NO: 522 - RNA, 20 nt, Artificial Sequence
  LDLR targeting guide sequence portion
agaggccaugggcugcugau

SEQ ID NO: 523 - RNA, 20 nt, Artificial Sequence
  LDLR targeting guide sequence portion
agaggggcagguugaccggg

SEQ ID NO: 524 - RNA, 20 nt, Artificial Sequence
  LDLR targeting guide sequence portion
agagguaaacacguugacuc

SEQ ID NO: 525 - RNA, 20 nt, Artificial Sequence
  LDLR targeting guide sequence portion
agaguuguacacuguguaca

SEQ ID NO: 526 - RNA, 20 nt, Artificial Sequence
  LDLR targeting guide sequence portion
agauaguggggauuuuuugu

SEQ ID NO: 527 - RNA, 20 nt, Artificial Sequence
  LDLR targeting guide sequence portion
agaucauuuccgacgccaug

SEQ ID NO: 528 - RNA, 20 nt, Artificial Sequence
  LDLR targeting guide sequence portion
agaugaaaggggaggggaug

SEQ ID NO: 529 - RNA, 20 nt, Artificial Sequence
  LDLR targeting guide sequence portion
agaugaagacccuauuucag

SEQ ID NO: 530 - RNA, 20 nt, Artificial Sequence
  LDLR targeting guide sequence portion
agauggcaccaacgggaccc

SEQ ID NO: 531 - RNA, 20 nt, Artificial Sequence
  LDLR targeting guide sequence portion
agaugggaucucgcuuuguu

SEQ ID NO: 532 - RNA, 20 nt, Artificial Sequence
  LDLR targeting guide sequence portion
agaugggugucacuuuuuaa

SEQ ID NO: 533 - RNA, 20 nt, Artificial Sequence
  LDLR targeting guide sequence portion
agauggucagucuggaggau

SEQ ID NO: 534 - RNA, 20 nt, Artificial Sequence
  LDLR targeting guide sequence portion
agaugucacaagggauuggc

SEQ ID NO: 535 - RNA, 20 nt, Artificial Sequence
  LDLR targeting guide sequence portion
agauguucacgccacgucau

SEQ ID NO: 536 - RNA, 20 nt, Artificial Sequence
  LDLR targeting guide sequence portion
agauuauuugcacgaacugg

SEQ ID NO: 537 - RNA, 20 nt, Artificial Sequence
  LDLR targeting guide sequence portion
agauuggggaagugaauggc

SEQ ID NO: 538 - RNA, 20 nt, Artificial Sequence
  LDLR targeting guide sequence portion
agauugguggaugaggcagg

SEQ ID NO: 539 - RNA, 20 nt, Artificial Sequence
  LDLR targeting guide sequence portion
agcaaccaggguuugcaaaa

SEQ ID NO: 540 - RNA, 20 nt, Artificial Sequence
  LDLR targeting guide sequence portion
agcaaggcuugcauagaaga

SEQ ID NO: 541 - RNA, 20 nt, Artificial Sequence
  LDLR targeting guide sequence portion
agcaaguggcuuucaacaca

SEQ ID NO: 542 - RNA, 20 nt, Artificial Sequence
  LDLR targeting guide sequence portion
agcacguaaaugcgucccug

SEQ ID NO: 543 - RNA, 20 nt, Artificial Sequence
  LDLR targeting guide sequence portion
agcacuaggugggcggacau

SEQ ID NO: 544 - RNA, 20 nt, Artificial Sequence
  LDLR targeting guide sequence portion
agcagauggcaccaacggga

SEQ ID NO: 545 - RNA, 20 nt, Artificial Sequence
  LDLR targeting guide sequence portion
agcagcccauggccucuggc

SEQ ID NO: 546 - RNA, 20 nt, Artificial Sequence
  LDLR targeting guide sequence portion
agcaguggcauaaucauagc

SEQ ID NO: 547 - RNA, 20 nt, Artificial Sequence
  LDLR targeting guide sequence portion
agcauugccugccagagcuu

SEQ ID NO: 548 - RNA, 20 nt, Artificial Sequence
  LDLR targeting guide sequence portion
agccaaaccccuaaacucag

SEQ ID NO: 549 - RNA, 20 nt, Artificial Sequence
  LDLR targeting guide sequence portion
agccacaccugggugcaggc

SEQ ID NO: 550 - RNA, 20 nt, Artificial Sequence
  LDLR targeting guide sequence portion
agccacucauacauacaacg

SEQ ID NO: 551 - RNA, 20 nt, Artificial Sequence
  LDLR targeting guide sequence portion
agccacuugcuucucugggc

SEQ ID NO: 552 - RNA, 20 nt, Artificial Sequence
  LDLR targeting guide sequence portion
agccaggaaagggauucaug

SEQ ID NO: 553 - RNA, 20 nt, Artificial Sequence
  LDLR targeting guide sequence portion
agccagguuagccuuugccc

SEQ ID NO: 554 - RNA, 20 nt, Artificial Sequence
  LDLR targeting guide sequence portion
agccauucacuuccccaauc

SEQ ID NO: 555 - RNA, 20 nt, Artificial Sequence
  LDLR targeting guide sequence portion
agccauugcaugggcacugu

SEQ ID NO: 556 - RNA, 20 nt, Artificial Sequence
  LDLR targeting guide sequence portion
agcccauggccucuggccag

SEQ ID NO: 557 - RNA, 20 nt, Artificial Sequence
  LDLR targeting guide sequence portion
agcccgugucaaugaaugcc

SEQ ID NO: 558 - RNA, 20 nt, Artificial Sequence
  LDLR targeting guide sequence portion
agccgugaucgugaauaucg

SEQ ID NO: 559 - RNA, 20 nt, Artificial Sequence
  LDLR targeting guide sequence portion
agccucaaaugccugagcuc

SEQ ID NO: 560 - RNA, 20 nt, Artificial Sequence
  LDLR targeting guide sequence portion
agccuccgucagacucccgc

SEQ ID NO: 561 - RNA, 20 nt, Artificial Sequence
  LDLR targeting guide sequence portion
agccucgccaugccuggcca

SEQ ID NO: 562 - RNA, 20 nt, Artificial Sequence
  LDLR targeting guide sequence portion
agccugaaugucuuacugug

SEQ ID NO: 563 - RNA, 20 nt, Artificial Sequence
  LDLR targeting guide sequence portion
agccugagucacuggucacc

SEQ ID NO: 564 - RNA, 20 nt, Artificial Sequence
  LDLR targeting guide sequence portion
agccuggugcccauccuccc

SEQ ID NO: 565 - RNA, 20 nt, Artificial Sequence
  LDLR targeting guide sequence portion
agccuguucugccucccaga

SEQ ID NO: 566 - RNA, 20 nt, Artificial Sequence
  LDLR targeting guide sequence portion
agccuugcuagacagccagg

SEQ ID NO: 567 - RNA, 20 nt, Artificial Sequence
  LDLR targeting guide sequence portion
agccuuucugguuucggagc

SEQ ID NO: 568 - RNA, 20 nt, Artificial Sequence
  LDLR targeting guide sequence portion
agccuuugcccugucacccc

SEQ ID NO: 569 - RNA, 20 nt, Artificial Sequence
  LDLR targeting guide sequence portion
agcgagaucccaucucuaca

SEQ ID NO: 570 - RNA, 20 nt, Artificial Sequence
  LDLR targeting guide sequence portion
agcguugcacacaguccagu

SEQ ID NO: 571 - RNA, 20 nt, Artificial Sequence
  LDLR targeting guide sequence portion
agcuaugauuaugccacugc

SEQ ID NO: 572 - RNA, 20 nt, Artificial Sequence
  LDLR targeting guide sequence portion
agcucacgacagccucaaau

SEQ ID NO: 573 - RNA, 20 nt, Artificial Sequence
  LDLR targeting guide sequence portion
agcucaggcauuugaggcug

SEQ ID NO: 574 - RNA, 20 nt, Artificial Sequence
  LDLR targeting guide sequence portion
agcucuggcaggcaaugcuu

SEQ ID NO: 575 - RNA, 20 nt, Artificial Sequence
  LDLR targeting guide sequence portion
agcuggaucacuugaguuca

SEQ ID NO: 576 - RNA, 20 nt, Artificial Sequence
  LDLR targeting guide sequence portion
aggaaaggaagaaaccaaaa

SEQ ID NO: 577 - RNA, 20 nt, Artificial Sequence
  LDLR targeting guide sequence portion
aggaaagggauucauggcgu

SEQ ID NO: 578 - RNA, 20 nt, Artificial Sequence
  LDLR targeting guide sequence portion
aggaagaaaccaaaauccca

SEQ ID NO: 579 - RNA, 20 nt, Artificial Sequence
  LDLR targeting guide sequence portion
aggaaggguucugggcaggg

SEQ ID NO: 580 - RNA, 20 nt, Artificial Sequence
  LDLR targeting guide sequence portion
aggaagguacaaacccaccu

SEQ ID NO: 581 - RNA, 20 nt, Artificial Sequence
  LDLR targeting guide sequence portion
aggaaguuuugaguuucucu

SEQ ID NO: 582 - RNA, 20 nt, Artificial Sequence
  LDLR targeting guide sequence portion
aggacaccagccuggugccc

SEQ ID NO: 583 - RNA, 20 nt, Artificial Sequence
  LDLR targeting guide sequence portion
aggacacguggccugcaccc

SEQ ID NO: 584 - RNA, 20 nt, Artificial Sequence
  LDLR targeting guide sequence portion
aggagaccacgggaauggaa

SEQ ID NO: 585 - RNA, 20 nt, Artificial Sequence
  LDLR targeting guide sequence portion
aggagucaacguguuuaccu

SEQ ID NO: 586 - RNA, 20 nt, Artificial Sequence
  LDLR targeting guide sequence portion
aggaguuggagaccaggccu

SEQ ID NO: 587 - RNA, 20 nt, Artificial Sequence
  LDLR targeting guide sequence portion
aggauaagagaaacaggccc

SEQ ID NO: 588 - RNA, 20 nt, Artificial Sequence
  LDLR targeting guide sequence portion
aggaugacaccuccauuucu

SEQ ID NO: 589 - RNA, 20 nt, Artificial Sequence
  LDLR targeting guide sequence portion
aggaugacguggcgugaaca

SEQ ID NO: 590 - RNA, 20 nt, Artificial Sequence
  LDLR targeting guide sequence portion
aggaugggcaccaggcuggu

SEQ ID NO: 591 - RNA, 20 nt, Artificial Sequence
  LDLR targeting guide sequence portion
aggaugguuugagcucaggc

SEQ ID NO: 592 - RNA, 20 nt, Artificial Sequence
  LDLR targeting guide sequence portion
aggauugugucacgguggag

SEQ ID NO: 593 - RNA, 20 nt, Artificial Sequence
  LDLR targeting guide sequence portion
aggcaauaacccccuacaca

SEQ ID NO: 594 - RNA, 20 nt, Artificial Sequence
  LDLR targeting guide sequence portion
aggcaaugcuuuggucuucu

SEQ ID NO: 595 - RNA, 20 nt, Artificial Sequence
  LDLR targeting guide sequence portion
aggcaccugugucuggccaa

SEQ ID NO: 596 - RNA, 20 nt, Artificial Sequence
  LDLR targeting guide sequence portion
aggcacgugccaccguaccc

SEQ ID NO: 597 - RNA, 20 nt, Artificial Sequence
  LDLR targeting guide sequence portion
aggcacuuaauaaauauuaa

SEQ ID NO: 598 - RNA, 20 nt, Artificial Sequence
  LDLR targeting guide sequence portion
aggcagaacaggcuucggac

SEQ ID NO: 599 - RNA, 20 nt, Artificial Sequence
  LDLR targeting guide sequence portion
aggcagagccugagucacug

SEQ ID NO: 600 - RNA, 20 nt, Artificial Sequence
  LDLR targeting guide sequence portion
aggcagauguucacgccacg

SEQ ID NO: 601 - RNA, 20 nt, Artificial Sequence
  LDLR targeting guide sequence portion
aggcagggccaggggguccc

SEQ ID NO: 602 - RNA, 20 nt, Artificial Sequence
  LDLR targeting guide sequence portion
aggcauggcgaggcugaggu

SEQ ID NO: 603 - RNA, 20 nt, Artificial Sequence
  LDLR targeting guide sequence portion
aggcauuucagaggcaauaa

SEQ ID NO: 604 - RNA, 20 nt, Artificial Sequence
  LDLR targeting guide sequence portion
aggcauuugaggcugucgug

SEQ ID NO: 605 - RNA, 20 nt, Artificial Sequence
  LDLR targeting guide sequence portion
aggcauuugcauagaagugg

SEQ ID NO: 606 - RNA, 20 nt, Artificial Sequence
  LDLR targeting guide sequence portion
aggccacguguccucacggc

SEQ ID NO: 607 - RNA, 20 nt, Artificial Sequence
  LDLR targeting guide sequence portion
aggccagggaaagcccgugu

SEQ ID NO: 608 - RNA, 20 nt, Artificial Sequence
  LDLR targeting guide sequence portion
aggccaugggcugcugaugc

SEQ ID NO: 609 - RNA, 20 nt, Artificial Sequence
  LDLR targeting guide sequence portion
aggcccagagaagcaagugg

SEQ ID NO: 610 - RNA, 20 nt, Artificial Sequence
  LDLR targeting guide sequence portion
aggcccggggggaccaggau

SEQ ID NO: 611 - RNA, 20 nt, Artificial Sequence
  LDLR targeting guide sequence portion
aggccggcgaggucucagga

SEQ ID NO: 612 - RNA, 20 nt, Artificial Sequence
  LDLR targeting guide sequence portion
aggccugagcaacaaagcga

SEQ ID NO: 613 - RNA, 20 nt, Artificial Sequence
  LDLR targeting guide sequence portion
aggccuggucuccaacuccu

SEQ ID NO: 614 - RNA, 20 nt, Artificial Sequence
  LDLR targeting guide sequence portion
aggcgugaggcaccuguguc

SEQ ID NO: 615 - RNA, 20 nt, Artificial Sequence
  LDLR targeting guide sequence portion
aggcuaaccuggcugucuag

SEQ ID NO: 616 - RNA, 20 nt, Artificial Sequence
  LDLR targeting guide sequence portion
aggcuacaaaaaccuucuau

SEQ ID NO: 617 - RNA, 20 nt, Artificial Sequence
  LDLR targeting guide sequence portion
aggcucugccucugggaagu

SEQ ID NO: 618 - RNA, 20 nt, Artificial Sequence
  LDLR targeting guide sequence portion
aggcugagcuggaucacuug

SEQ ID NO: 619 - RNA, 20 nt, Artificial Sequence
  LDLR targeting guide sequence portion
aggcuggaaagcaguggcau

SEQ ID NO: 620 - RNA, 20 nt, Artificial Sequence
  LDLR targeting guide sequence portion
aggcugguguccugacagcc

SEQ ID NO: 621 - RNA, 20 nt, Artificial Sequence
  LDLR targeting guide sequence portion
aggcugucacugucucuccg

SEQ ID NO: 622 - RNA, 20 nt, Artificial Sequence
  LDLR targeting guide sequence portion
aggcuuaucacgguucccug

SEQ ID NO: 623 - RNA, 20 nt, Artificial Sequence
  LDLR targeting guide sequence portion
aggcuucggacagugcccau

SEQ ID NO: 624 - RNA, 20 nt, Artificial Sequence
  LDLR targeting guide sequence portion
aggcuugcauagaagaggua

SEQ ID NO: 625 - RNA, 20 nt, Artificial Sequence
  LDLR targeting guide sequence portion
agggaaagcccgugucaaug

SEQ ID NO: 626 - RNA, 20 nt, Artificial Sequence
  LDLR targeting guide sequence portion
agggaaccgugauaagccuu

SEQ ID NO: 627 - RNA, 20 nt, Artificial Sequence
  LDLR targeting guide sequence portion
agggacgcauuuacgugcuc

SEQ ID NO: 628 - RNA, 20 nt, Artificial Sequence
  LDLR targeting guide sequence portion
agggacgggacuccaggcag

SEQ ID NO: 629 - RNA, 20 nt, Artificial Sequence
  LDLR targeting guide sequence portion
agggauucauggcgucggaa

SEQ ID NO: 630 - RNA, 20 nt, Artificial Sequence
  LDLR targeting guide sequence portion
agggauuggcaauugucccc

SEQ ID NO: 631 - RNA, 20 nt, Artificial Sequence
  LDLR targeting guide sequence portion
agggcaaaggcuaaccuggc

SEQ ID NO: 632 - RNA, 20 nt, Artificial Sequence
  LDLR targeting guide sequence portion
agggccagggggucccguug

SEQ ID NO: 633 - RNA, 20 nt, Artificial Sequence
  LDLR targeting guide sequence portion
agggccccgagaauagucac

SEQ ID NO: 634 - RNA, 20 nt, Artificial Sequence
  LDLR targeting guide sequence portion
aggggaggggaugucaggcc

SEQ ID NO: 635 - RNA, 20 nt, Artificial Sequence
  LDLR targeting guide sequence portion
aggggaugucaggcccagag

SEQ ID NO: 636 - RNA, 20 nt, Artificial Sequence
  LDLR targeting guide sequence portion
aggggcagguugaccgggac

SEQ ID NO: 637 - RNA, 20 nt, Artificial Sequence
  LDLR targeting guide sequence portion
agggggucccguuggugcca

SEQ ID NO: 638 - RNA, 20 nt, Artificial Sequence
  LDLR targeting guide sequence portion
aggggguuauugccucugaa

SEQ ID NO: 639 - RNA, 20 nt, Artificial Sequence
  LDLR targeting guide sequence portion
aggggucgggaggaugggca

SEQ ID NO: 640 - RNA, 20 nt, Artificial Sequence
  LDLR targeting guide sequence portion
agggguuuggcuuagagauu

SEQ ID NO: 641 - RNA, 20 nt, Artificial Sequence
  LDLR targeting guide sequence portion
agggugaccagugacucagg

SEQ ID NO: 642 - RNA, 20 nt, Artificial Sequence
  LDLR targeting guide sequence portion
aggguucugggcagggacgg

SEQ ID NO: 643 - RNA, 20 nt, Artificial Sequence
  LDLR targeting guide sequence portion
agguaaacacguugacuccu

SEQ ID NO: 644 - RNA, 20 nt, Artificial Sequence
  LDLR targeting guide sequence portion
agguaaccgggugucucagg

SEQ ID NO: 645 - RNA, 20 nt, Artificial Sequence
  LDLR targeting guide sequence portion
agguacaaacccaccucgaa

SEQ ID NO: 646 - RNA, 20 nt, Artificial Sequence
  LDLR targeting guide sequence portion
aggucucaggaaggguucug

SEQ ID NO: 647 - RNA, 20 nt, Artificial Sequence
  LDLR targeting guide sequence portion
aggugggcggacauaaagac

SEQ ID NO: 648 - RNA, 20 nt, Artificial Sequence
  LDLR targeting guide sequence portion
agguggguuuguaccuuccu

SEQ ID NO: 649 - RNA, 20 nt, Artificial Sequence
  LDLR targeting guide sequence portion
aggugucauccugguccccc

SEQ ID NO: 650 - RNA, 20 nt, Artificial Sequence
  LDLR targeting guide sequence portion
agguguggcugucaggacac

SEQ ID NO: 651 - RNA, 20 nt, Artificial Sequence
  LDLR targeting guide sequence portion
agguuagccuuugcccuguc

SEQ ID NO: 652 - RNA, 20 nt, Artificial Sequence
  LDLR targeting guide sequence portion
agguucuuucugaaaucgcc

SEQ ID NO: 653 - RNA, 20 nt, Artificial Sequence
  LDLR targeting guide sequence portion
agguugaccgggacuucaaa

SEQ ID NO: 654 - RNA, 20 nt, Artificial Sequence
  LDLR targeting guide sequence portion
agguuuuuguagccugaaug

SEQ ID NO: 655 - RNA, 20 nt, Artificial Sequence
  LDLR targeting guide sequence portion
aguaacacggcgauuucaga

SEQ ID NO: 656 - RNA, 20 nt, Artificial Sequence
  LDLR targeting guide sequence portion
aguaagacauucaggcuaca

SEQ ID NO: 657 - RNA, 20 nt, Artificial Sequence
  LDLR targeting guide sequence portion
aguaagaccccaucucuuaa

SEQ ID NO: 658 - RNA, 20 nt, Artificial Sequence
  LDLR targeting guide sequence portion
agucaacguguuuaccucuu

SEQ ID NO: 659 - RNA, 20 nt, Artificial Sequence
  LDLR targeting guide sequence portion
agucacugaacaaauacagc

SEQ ID NO: 660 - RNA, 20 nt, Artificial Sequence
  LDLR targeting guide sequence portion
agucacuggucacccuuaau

SEQ ID NO: 661 - RNA, 20 nt, Artificial Sequence
  LDLR targeting guide sequence portion
aguccaguucgugcaaauaa

SEQ ID NO: 662 - RNA, 20 nt, Artificial Sequence
  LDLR targeting guide sequence portion
agucccggucaaccugcccc

SEQ ID NO: 663 - RNA, 20 nt, Artificial Sequence
  LDLR targeting guide sequence portion
agucccgucaaacgauccag

SEQ ID NO: 664 - RNA, 20 nt, Artificial Sequence
  LDLR targeting guide sequence portion
agucccgucccugcccagaa

SEQ ID NO: 665 - RNA, 20 nt, Artificial Sequence
  LDLR targeting guide sequence portion
agucugacggaggcugucac

SEQ ID NO: 666 - RNA, 20 nt, Artificial Sequence
  LDLR targeting guide sequence portion
agucuggaggaugacguggc

SEQ ID NO: 667 - RNA, 20 nt, Artificial Sequence
  LDLR targeting guide sequence portion
agucuggaucguuugacggg

SEQ ID NO: 668 - RNA, 20 nt, Artificial Sequence
  LDLR targeting guide sequence portion
agugaauggcuuggaggcau

SEQ ID NO: 669 - RNA, 20 nt, Artificial Sequence
  LDLR targeting guide sequence portion
agugacacccaucucccaga

SEQ ID NO: 670 - RNA, 20 nt, Artificial Sequence
  LDLR targeting guide sequence portion
agugacagccuccgucagac

SEQ ID NO: 671 - RNA, 20 nt, Artificial Sequence
  LDLR targeting guide sequence portion
agugacuauucucggggccc

SEQ ID NO: 672 - RNA, 20 nt, Artificial Sequence
  LDLR targeting guide sequence portion
agugacucaggcucugccuc

SEQ ID NO: 673 - RNA, 20 nt, Artificial Sequence
  LDLR targeting guide sequence portion
agugauaacaguuucaacca

SEQ ID NO: 674 - RNA, 20 nt, Artificial Sequence
  LDLR targeting guide sequence portion
agugauccagcucagccucc

SEQ ID NO: 675 - RNA, 20 nt, Artificial Sequence
  LDLR targeting guide sequence portion
agugcaaaauaauaacacaa

SEQ ID NO: 676 - RNA, 20 nt, Artificial Sequence
  LDLR targeting guide sequence portion
agugcaaacauaacaaaaaa

SEQ ID NO: 677 - RNA, 20 nt, Artificial Sequence
  LDLR targeting guide sequence portion
agugcaacaguaacacggcg

SEQ ID NO: 678 - RNA, 20 nt, Artificial Sequence
  LDLR targeting guide sequence portion
agugcaaggagaccacggga

SEQ ID NO: 679 - RNA, 20 nt, Artificial Sequence
  LDLR targeting guide sequence portion
agugcagggaaccgugauaa

SEQ ID NO: 680 - RNA, 20 nt, Artificial Sequence
  LDLR targeting guide sequence portion
agugcccaugcaauggcuug

SEQ ID NO: 681 - RNA, 20 nt, Artificial Sequence
  LDLR targeting guide sequence portion
agugccugagacacccgguu

SEQ ID NO: 682 - RNA, 20 nt, Artificial Sequence
  LDLR targeting guide sequence portion
agugcuuccacuucuaugca

SEQ ID NO: 683 - RNA, 20 nt, Artificial Sequence
  LDLR targeting guide sequence portion
aguggaagcacuaggugggc

SEQ ID NO: 684 - RNA, 20 nt, Artificial Sequence
  LDLR targeting guide sequence portion
aguggcaucauuuggugaau

SEQ ID NO: 685 - RNA, 20 nt, Artificial Sequence
  LDLR targeting guide sequence portion
aguggcuucugggagauggg

SEQ ID NO: 686 - RNA, 20 nt, Artificial Sequence
  LDLR targeting guide sequence portion
aguggcuuucaacacacaac

SEQ ID NO: 687 - RNA, 20 nt, Artificial Sequence
  LDLR targeting guide sequence portion
aguggggauuuuuuguuaug

SEQ ID NO: 688 - RNA, 20 nt, Artificial Sequence
  LDLR targeting guide sequence portion
aguggguaggggucgggagg

SEQ ID NO: 689 - RNA, 20 nt, Artificial Sequence
  LDLR targeting guide sequence portion
agugguuuaaaaagugacac

SEQ ID NO: 690 - RNA, 20 nt, Artificial Sequence
  LDLR targeting guide sequence portion
aguguacaacucugaacuga

SEQ ID NO: 691 - RNA, 20 nt, Artificial Sequence
  LDLR targeting guide sequence portion
agugucuuucgagguggguu

SEQ ID NO: 692 - RNA, 20 nt, Artificial Sequence
  LDLR targeting guide sequence portion
aguguuuugucccuggggac

SEQ ID NO: 693 - RNA, 20 nt, Artificial Sequence
  LDLR targeting guide sequence portion
aguuaaaaaucagcugggua

SEQ ID NO: 694 - RNA, 20 nt, Artificial Sequence
  LDLR targeting guide sequence portion
aguucagaguuguacacugu

SEQ ID NO: 695 - RNA, 20 nt, Artificial Sequence
  LDLR targeting guide sequence portion
aguucaggaguuggagacca

SEQ ID NO: 696 - RNA, 20 nt, Artificial Sequence
  LDLR targeting guide sequence portion
aguucgugcaaauaaucuuu

SEQ ID NO: 697 - RNA, 20 nt, Artificial Sequence
  LDLR targeting guide sequence portion
aguucucgauauucacgauc

SEQ ID NO: 698 - RNA, 20 nt, Artificial Sequence
  LDLR targeting guide sequence portion
aguuggagaccaggccugag

SEQ ID NO: 699 - RNA, 20 nt, Artificial Sequence
  LDLR targeting guide sequence portion
aguuguacacuguguacauu

SEQ ID NO: 700 - RNA, 20 nt, Artificial Sequence
  LDLR targeting guide sequence portion
aguuguauuucugaaauagg

SEQ ID NO: 701 - RNA, 20 nt, Artificial Sequence
  LDLR targeting guide sequence portion
aguuuagggguuuggcuuag

SEQ ID NO: 702 - RNA, 20 nt, Artificial Sequence
  LDLR targeting guide sequence portion
aguuucaaccaauauacaaa

SEQ ID NO: 703 - RNA, 20 nt, Artificial Sequence
  LDLR targeting guide sequence portion
aguuucucuccaccgugaca

SEQ ID NO: 704 - RNA, 20 nt, Artificial Sequence
  LDLR targeting guide sequence portion
aguuuggucucggugccacc

SEQ ID NO: 705 - RNA, 20 nt, Artificial Sequence
  LDLR targeting guide sequence portion
aguuuugaguuucucuccac

SEQ ID NO: 706 - RNA, 20 nt, Artificial Sequence
  LDLR targeting guide sequence portion
auaaaacaaagcucuggcag

SEQ ID NO: 707 - RNA, 20 nt, Artificial Sequence
  LDLR targeting guide sequence portion
auaaaacaaggccggcgagg

SEQ ID NO: 708 - RNA, 20 nt, Artificial Sequence
  LDLR targeting guide sequence portion
auaaagaagaggcauuucag

SEQ ID NO: 709 - RNA, 20 nt, Artificial Sequence
  LDLR targeting guide sequence portion
auaaagacgacaauggcagu

SEQ ID NO: 710 - RNA, 20 nt, Artificial Sequence
  LDLR targeting guide sequence portion
auaaauaaauccuccagucu

SEQ ID NO: 711 - RNA, 20 nt, Artificial Sequence
  LDLR targeting guide sequence portion
auaaauauuaagggugacca

SEQ ID NO: 712 - RNA, 20 nt, Artificial Sequence
  LDLR targeting guide sequence portion
auaaauccuccagucuggau

SEQ ID NO: 713 - RNA, 20 nt, Artificial Sequence
  LDLR targeting guide sequence portion
auaacaaaaaauccccacua

SEQ ID NO: 714 - RNA, 20 nt, Artificial Sequence
  LDLR targeting guide sequence portion
auaacacaaaugccaaaugu

SEQ ID NO: 715 - RNA, 20 nt, Artificial Sequence
  LDLR targeting guide sequence portion
auaacccccuacacagggcc

SEQ ID NO: 716 - RNA, 20 nt, Artificial Sequence
  LDLR targeting guide sequence portion
auaagagaaacaggcccggg

SEQ ID NO: 717 - RNA, 20 nt, Artificial Sequence
  LDLR targeting guide sequence portion
auaagccuuucugguuucgg

SEQ ID NO: 718 - RNA, 20 nt, Artificial Sequence
  LDLR targeting guide sequence portion
auaaucauagcucacgacag

SEQ ID NO: 719 - RNA, 20 nt, Artificial Sequence
  LDLR targeting guide sequence portion
auaaucuuuguacauaaaga

SEQ ID NO: 720 - RNA, 20 nt, Artificial Sequence
  LDLR targeting guide sequence portion
auacaacggggacaucauuc

SEQ ID NO: 721 - RNA, 20 nt, Artificial Sequence
  LDLR targeting guide sequence portion
auacagcaaccaggguuugc

SEQ ID NO: 722 - RNA, 20 nt, Artificial Sequence
  LDLR targeting guide sequence portion
auacagugguuuaaaaagug

SEQ ID NO: 723 - RNA, 20 nt, Artificial Sequence
  LDLR targeting guide sequence portion
auacauacaacggggacauc

SEQ ID NO: 724 - RNA, 20 nt, Artificial Sequence
  LDLR targeting guide sequence portion
auacccaucaacgacaagau

SEQ ID NO: 725 - RNA, 20 nt, Artificial Sequence
  LDLR targeting guide sequence portion
auagaagagguaaacacguu

SEQ ID NO: 726 - RNA, 20 nt, Artificial Sequence
  LDLR targeting guide sequence portion
auagaagguuuuuguagccu

SEQ ID NO: 727 - RNA, 20 nt, Artificial Sequence
  LDLR targeting guide sequence portion
auagaaguggaagcacuagg

SEQ ID NO: 728 - RNA, 20 nt, Artificial Sequence
  LDLR targeting guide sequence portion
auagcucacgacagccucaa

SEQ ID NO: 729 - RNA, 20 nt, Artificial Sequence
  LDLR targeting guide sequence portion
auagucacugaacaaauaca

SEQ ID NO: 730 - RNA, 20 nt, Artificial Sequence
  LDLR targeting guide sequence portion
auaguggggauuuuuuguua

SEQ ID NO: 731 - RNA, 20 nt, Artificial Sequence
  LDLR targeting guide sequence portion
auaguuguauuucugaaaua

SEQ ID NO: 732 - RNA, 20 nt, Artificial Sequence
  LDLR targeting guide sequence portion
auauaaaacaaagcucuggc

SEQ ID NO: 733 - RNA, 20 nt, Artificial Sequence
  LDLR targeting guide sequence portion
auauauaaaacaaagcucug

SEQ ID NO: 734 - RNA, 20 nt, Artificial Sequence
  LDLR targeting guide sequence portion
auauauuuauucaucuggga

SEQ ID NO: 735 - RNA, 20 nt, Artificial Sequence
  LDLR targeting guide sequence portion
auaucgagaacugccauugu

SEQ ID NO: 736 - RNA, 20 nt, Artificial Sequence
  LDLR targeting guide sequence portion
auauuaagggugaccaguga

SEQ ID NO: 737 - RNA, 20 nt, Artificial Sequence
  LDLR targeting guide sequence portion
auauucacgaucacggcuuu

SEQ ID NO: 738 - RNA, 20 nt, Artificial Sequence
  LDLR targeting guide sequence portion
auauuuauuaagugccugag

SEQ ID NO: 739 - RNA, 20 nt, Artificial Sequence
  LDLR targeting guide sequence portion
auauuuauucaucugggagg

SEQ ID NO: 740 - RNA, 20 nt, Artificial Sequence
  LDLR targeting guide sequence portion
aucaacgacaagauugggga

SEQ ID NO: 741 - RNA, 20 nt, Artificial Sequence
  LDLR targeting guide sequence portion
aucacaggcacgugccaccg

SEQ ID NO: 742 - RNA, 20 nt, Artificial Sequence
  LDLR targeting guide sequence portion
aucacaguaagacauucagg

SEQ ID NO: 743 - RNA, 20 nt, Artificial Sequence
  LDLR targeting guide sequence portion
aucacggcuuugaagucccg

SEQ ID NO: 744 - RNA, 20 nt, Artificial Sequence
  LDLR targeting guide sequence portion
aucagcagcccauggccucu

SEQ ID NO: 745 - RNA, 20 nt, Artificial Sequence
  LDLR targeting guide sequence portion
aucagcuggguacgguggca

SEQ ID NO: 746 - RNA, 20 nt, Artificial Sequence
  LDLR targeting guide sequence portion
aucagugcaacaguaacacg

SEQ ID NO: 747 - RNA, 20 nt, Artificial Sequence
  LDLR targeting guide sequence portion
aucauagcucacgacagccu

SEQ ID NO: 748 - RNA, 20 nt, Artificial Sequence
  LDLR targeting guide sequence portion
aucaugacccacccaguguc

SEQ ID NO: 749 - RNA, 20 nt, Artificial Sequence
  LDLR targeting guide sequence portion
aucauucucccaaaaagcgu

SEQ ID NO: 750 - RNA, 20 nt, Artificial Sequence
  LDLR targeting guide sequence portion
aucauuuccgacgccaugaa

SEQ ID NO: 751 - RNA, 20 nt, Artificial Sequence
  LDLR targeting guide sequence portion
aucauuuggugaaugaguuu

SEQ ID NO: 752 - RNA, 20 nt, Artificial Sequence
  LDLR targeting guide sequence portion
auccaccaaucucuaagcca

SEQ ID NO: 753 - RNA, 20 nt, Artificial Sequence
  LDLR targeting guide sequence portion
auccagacuggaggauuuau

SEQ ID NO: 754 - RNA, 20 nt, Artificial Sequence
  LDLR targeting guide sequence portion
aucccaacccaagccauugc

SEQ ID NO: 755 - RNA, 20 nt, Artificial Sequence
  LDLR targeting guide sequence portion
aucccaggccagggaaagcc

SEQ ID NO: 756 - RNA, 20 nt, Artificial Sequence
  LDLR targeting guide sequence portion
aucccaucccaacacacacg

SEQ ID NO: 757 - RNA, 20 nt, Artificial Sequence
  LDLR targeting guide sequence portion
aucccaucucuacaaaaacc

SEQ ID NO: 758 - RNA, 20 nt, Artificial Sequence
  LDLR targeting guide sequence portion
auccccacuaucuguacagg

SEQ ID NO: 759 - RNA, 20 nt, Artificial Sequence
  LDLR targeting guide sequence portion
auccccuccccuuucaucuu

SEQ ID NO: 760 - RNA, 20 nt, Artificial Sequence
  LDLR targeting guide sequence portion
aucccuugugacaucuucac

SEQ ID NO: 761 - RNA, 20 nt, Artificial Sequence
  LDLR targeting guide sequence portion
aucccuuuccuggcuuaagg

SEQ ID NO: 762 - RNA, 20 nt, Artificial Sequence
  LDLR targeting guide sequence portion
auccgugguggcaccgagac

SEQ ID NO: 763 - RNA, 20 nt, Artificial Sequence
  LDLR targeting guide sequence portion
auccucaaacauggaagaug

SEQ ID NO: 764 - RNA, 20 nt, Artificial Sequence
  LDLR targeting guide sequence portion
auccuccagucuggaucguu

SEQ ID NO: 765 - RNA, 20 nt, Artificial Sequence
  LDLR targeting guide sequence portion
auccucccaccucagccucg

SEQ ID NO: 766 - RNA, 20 nt, Artificial Sequence
  LDLR targeting guide sequence portion
auccucccgaccccuaccca

SEQ ID NO: 767 - RNA, 20 nt, Artificial Sequence
  LDLR targeting guide sequence portion
auccugguccccccgggccu

SEQ ID NO: 768 - RNA, 20 nt, Artificial Sequence
  LDLR targeting guide sequence portion
auccuucacgaggaaaggaa

SEQ ID NO: 769 - RNA, 20 nt, Artificial Sequence
  LDLR targeting guide sequence portion
aucgagaacugccauugucg

SEQ ID NO: 770 - RNA, 20 nt, Artificial Sequence
  LDLR targeting guide sequence portion
aucgccguguuacuguugca

SEQ ID NO: 771 - RNA, 20 nt, Artificial Sequence
  LDLR targeting guide sequence portion
aucgugaauaucgagaacug

SEQ ID NO: 772 - RNA, 20 nt, Artificial Sequence
  LDLR targeting guide sequence portion
aucguuugacgggacuucag

SEQ ID NO: 773 - RNA, 20 nt, Artificial Sequence
  LDLR targeting guide sequence portion
aucuauuuauuuuugcaaac

SEQ ID NO: 774 - RNA, 20 nt, Artificial Sequence
  LDLR targeting guide sequence portion
aucucccagaagccacucau

SEQ ID NO: 775 - RNA, 20 nt, Artificial Sequence
  LDLR targeting guide sequence portion
aucucgcuuuguugcucagg

SEQ ID NO: 776 - RNA, 20 nt, Artificial Sequence
  LDLR targeting guide sequence portion
aucucuaagccaaaccccua

SEQ ID NO: 777 - RNA, 20 nt, Artificial Sequence
  LDLR targeting guide sequence portion
aucucuuaaaaaaugaauuu

SEQ ID NO: 778 - RNA, 20 nt, Artificial Sequence
  LDLR targeting guide sequence portion
aucugccuggagucccgucc

SEQ ID NO: 779 - RNA, 20 nt, Artificial Sequence
  LDLR targeting guide sequence portion
aucugcuguuguguguugaa

SEQ ID NO: 780 - RNA, 20 nt, Artificial Sequence
  LDLR targeting guide sequence portion
aucuggcugaauccguggug

SEQ ID NO: 781 - RNA, 20 nt, Artificial Sequence
  LDLR targeting guide sequence portion
aucugggaggcagaacaggc

SEQ ID NO: 782 - RNA, 20 nt, Artificial Sequence
  LDLR targeting guide sequence portion
aucuguacagggacgcauuu

SEQ ID NO: 783 - RNA, 20 nt, Artificial Sequence
  LDLR targeting guide sequence portion
aucuucacgcgggagucuga

SEQ ID NO: 784 - RNA, 20 nt, Artificial Sequence
  LDLR targeting guide sequence portion
aucuuccauguuugaggauu

SEQ ID NO: 785 - RNA, 20 nt, Artificial Sequence
  LDLR targeting guide sequence portion
aucuugucguugauggguau

SEQ ID NO: 786 - RNA, 20 nt, Artificial Sequence
  LDLR targeting guide sequence portion
aucuuuguacauaaagaaga

SEQ ID NO: 787 - RNA, 20 nt, Artificial Sequence
  LDLR targeting guide sequence portion
augaaaggggaggggauguc

SEQ ID NO: 788 - RNA, 20 nt, Artificial Sequence
  LDLR targeting guide sequence portion
augaagacccuauuucagaa

SEQ ID NO: 789 - RNA, 20 nt, Artificial Sequence
  LDLR targeting guide sequence portion
augaaucccuuuccuggcuu

SEQ ID NO: 790 - RNA, 20 nt, Artificial Sequence
  LDLR targeting guide sequence portion
augaaugccggggacagaga

SEQ ID NO: 791 - RNA, 20 nt, Artificial Sequence
  LDLR targeting guide sequence portion
augaauuuggccagacacag

SEQ ID NO: 792 - RNA, 20 nt, Artificial Sequence
  LDLR targeting guide sequence portion
augacaccuccauuucucuc

SEQ ID NO: 793 - RNA, 20 nt, Artificial Sequence
  LDLR targeting guide sequence portion
augacccacccagugucuuu

SEQ ID NO: 794 - RNA, 20 nt, Artificial Sequence
  LDLR targeting guide sequence portion
augacguggcgugaacaucu

SEQ ID NO: 795 - RNA, 20 nt, Artificial Sequence
  LDLR targeting guide sequence portion
augaggcagggccagggggu

SEQ ID NO: 796 - RNA, 20 nt, Artificial Sequence
  LDLR targeting guide sequence portion
augaguggcuucugggagau

SEQ ID NO: 797 - RNA, 20 nt, Artificial Sequence
  LDLR targeting guide sequence portion
augaguuuggucucggugcc

SEQ ID NO: 798 - RNA, 20 nt, Artificial Sequence
  LDLR targeting guide sequence portion
augaucuggcugaauccgug

SEQ ID NO: 799 - RNA, 20 nt, Artificial Sequence
  LDLR targeting guide sequence portion
augauguccccguuguaugu

SEQ ID NO: 800 - RNA, 20 nt, Artificial Sequence
  LDLR targeting guide sequence portion
augauuaugccacugcuuuc

SEQ ID NO: 801 - RNA, 20 nt, Artificial Sequence
  LDLR targeting guide sequence portion
augauucgggggugacaggg

SEQ ID NO: 802 - RNA, 20 nt, Artificial Sequence
  LDLR targeting guide sequence portion
augcaaaugccuccaagcca

SEQ ID NO: 803 - RNA, 20 nt, Artificial Sequence
  LDLR targeting guide sequence portion
augcaagccuugcuagacag

SEQ ID NO: 804 - RNA, 20 nt, Artificial Sequence
  LDLR targeting guide sequence portion
augcaauggcuuggguuggg

SEQ ID NO: 805 - RNA, 20 nt, Artificial Sequence
  LDLR targeting guide sequence portion
augcacggugaggccgggcg

SEQ ID NO: 806 - RNA, 20 nt, Artificial Sequence
  LDLR targeting guide sequence portion
augcauggugcaucagcagc

SEQ ID NO: 807 - RNA, 20 nt, Artificial Sequence
  LDLR targeting guide sequence portion
augccaaauguacacagugu

SEQ ID NO: 808 - RNA, 20 nt, Artificial Sequence
  LDLR targeting guide sequence portion
augccacuucccagaggcag

SEQ ID NO: 809 - RNA, 20 nt, Artificial Sequence
  LDLR targeting guide sequence portion
augccggggacagagagggg

SEQ ID NO: 810 - RNA, 20 nt, Artificial Sequence
  LDLR targeting guide sequence portion
augccuccaagccauucacu

SEQ ID NO: 811 - RNA, 20 nt, Artificial Sequence
  LDLR targeting guide sequence portion
augccucuucuuuauguaca

SEQ ID NO: 812 - RNA, 20 nt, Artificial Sequence
  LDLR targeting guide sequence portion
augccugagcucaaaccauc

SEQ ID NO: 813 - RNA, 20 nt, Artificial Sequence
  LDLR targeting guide sequence portion
augccuggccagaggccaug

SEQ ID NO: 814 - RNA, 20 nt, Artificial Sequence
  LDLR targeting guide sequence portion
augcgucccuguacagauag

SEQ ID NO: 815 - RNA, 20 nt, Artificial Sequence
  LDLR targeting guide sequence portion
augcuuuggucuucucuguc

SEQ ID NO: 816 - RNA, 20 nt, Artificial Sequence
  LDLR targeting guide sequence portion
auggaagaugaaaggggagg

SEQ ID NO: 817 - RNA, 20 nt, Artificial Sequence
  LDLR targeting guide sequence portion
auggaaguggguaggggucg

SEQ ID NO: 818 - RNA, 20 nt, Artificial Sequence
  LDLR targeting guide sequence portion
auggaggugucauccugguc

SEQ ID NO: 819 - RNA, 20 nt, Artificial Sequence
  LDLR targeting guide sequence portion
auggcaccaacgggaccccc

SEQ ID NO: 820 - RNA, 20 nt, Artificial Sequence
  LDLR targeting guide sequence portion
auggcaguucucgauauuca

SEQ ID NO: 821 - RNA, 20 nt, Artificial Sequence
  LDLR targeting guide sequence portion
auggccucuggccaggcaug

SEQ ID NO: 822 - RNA, 20 nt, Artificial Sequence
  LDLR targeting guide sequence portion
auggcgaggcugagguggga

SEQ ID NO: 823 - RNA, 20 nt, Artificial Sequence
  LDLR targeting guide sequence portion
auggcgucggaaaugaucug

SEQ ID NO: 824 - RNA, 20 nt, Artificial Sequence
  LDLR targeting guide sequence portion
auggcuuggaggcauuugca

SEQ ID NO: 825 - RNA, 20 nt, Artificial Sequence
  LDLR targeting guide sequence portion
auggcuuggguugggauuuu

SEQ ID NO: 826 - RNA, 20 nt, Artificial Sequence
  LDLR targeting guide sequence portion
augggaucccaggccaggga

SEQ ID NO: 827 - RNA, 20 nt, Artificial Sequence
  LDLR targeting guide sequence portion
augggaucucgcuuuguugc

SEQ ID NO: 828 - RNA, 20 nt, Artificial Sequence
  LDLR targeting guide sequence portion
augggcaccaggcugguguc

SEQ ID NO: 829 - RNA, 20 nt, Artificial Sequence
  LDLR targeting guide sequence portion
augggcacuguccgaagccu

SEQ ID NO: 830 - RNA, 20 nt, Artificial Sequence
  LDLR targeting guide sequence portion
augggcugcugaugcaccau

SEQ ID NO: 831 - RNA, 20 nt, Artificial Sequence
  LDLR targeting guide sequence portion
auggguauguguuuaaaaca

SEQ ID NO: 832 - RNA, 20 nt, Artificial Sequence
  LDLR targeting guide sequence portion
augggugucacuuuuuaaac

SEQ ID NO: 833 - RNA, 20 nt, Artificial Sequence
  LDLR targeting guide sequence portion
auggucagucuggaggauga

SEQ ID NO: 834 - RNA, 20 nt, Artificial Sequence
  LDLR targeting guide sequence portion
auggugcaucagcagcccau

SEQ ID NO: 835 - RNA, 20 nt, Artificial Sequence
  LDLR targeting guide sequence portion
augguuugagcucaggcauu

SEQ ID NO: 836 - RNA, 20 nt, Artificial Sequence
  LDLR targeting guide sequence portion
auguacaaagauuauuugca

SEQ ID NO: 837 - RNA, 20 nt, Artificial Sequence
  LDLR targeting guide sequence portion
auguacacaguguacaacuc

SEQ ID NO: 838 - RNA, 20 nt, Artificial Sequence
  LDLR targeting guide sequence portion
auguaugaguggcuucuggg

SEQ ID NO: 839 - RNA, 20 nt, Artificial Sequence
  LDLR targeting guide sequence portion
augucacaagggauuggcaa

SEQ ID NO: 840 - RNA, 20 nt, Artificial Sequence
  LDLR targeting guide sequence portion
augucaggcccagagaagca

SEQ ID NO: 841 - RNA, 20 nt, Artificial Sequence
  LDLR targeting guide sequence portion
auguccccguuguauguaug

SEQ ID NO: 842 - RNA, 20 nt, Artificial Sequence
  LDLR targeting guide sequence portion
auguccgcccaccuagugcu

SEQ ID NO: 843 - RNA, 20 nt, Artificial Sequence
  LDLR targeting guide sequence portion
auguccggagagacagugac

SEQ ID NO: 844 - RNA, 20 nt, Artificial Sequence
  LDLR targeting guide sequence portion
auguguuuaaaacaugcacg

SEQ ID NO: 845 - RNA, 20 nt, Artificial Sequence
  LDLR targeting guide sequence portion
auguucacgccacgucaucc

SEQ ID NO: 846 - RNA, 20 nt, Artificial Sequence
  LDLR targeting guide sequence portion
auguuugaggauugugucac

SEQ ID NO: 847 - RNA, 20 nt, Artificial Sequence
  LDLR targeting guide sequence portion
auguuugcacuuuguauauu

SEQ ID NO: 848 - RNA, 20 nt, Artificial Sequence
  LDLR targeting guide sequence portion
auguuuuaaacacauaccca

SEQ ID NO: 849 - RNA, 20 nt, Artificial Sequence
  LDLR targeting guide sequence portion
auuaagggugaccagugacu

SEQ ID NO: 850 - RNA, 20 nt, Artificial Sequence
  LDLR targeting guide sequence portion
auuaagugccugagacaccc

SEQ ID NO: 851 - RNA, 20 nt, Artificial Sequence
  LDLR targeting guide sequence portion
auuacaggcgugaggcaccu

SEQ ID NO: 852 - RNA, 20 nt, Artificial Sequence
  LDLR targeting guide sequence portion
auuaugccacugcuuuccag

SEQ ID NO: 853 - RNA, 20 nt, Artificial Sequence
  LDLR targeting guide sequence portion
auuauuugcacgaacuggac

SEQ ID NO: 854 - RNA, 20 nt, Artificial Sequence
  LDLR targeting guide sequence portion
auucaaagacagagaagacc

SEQ ID NO: 855 - RNA, 20 nt, Artificial Sequence
  LDLR targeting guide sequence portion
auucaccaaaugaugccacu

SEQ ID NO: 856 - RNA, 20 nt, Artificial Sequence
  LDLR targeting guide sequence portion
auucacgaucacggcuuuga

SEQ ID NO: 857 - RNA, 20 nt, Artificial Sequence
  LDLR targeting guide sequence portion
auucacuuccccaaucuugu

SEQ ID NO: 858 - RNA, 20 nt, Artificial Sequence
  LDLR targeting guide sequence portion
auucagccagaucauuuccg

SEQ ID NO: 859 - RNA, 20 nt, Artificial Sequence
  LDLR targeting guide sequence portion
auucaggcuacaaaaaccuu

SEQ ID NO: 860 - RNA, 20 nt, Artificial Sequence
  LDLR targeting guide sequence portion
auucaucugggaggcagaac

SEQ ID NO: 861 - RNA, 20 nt, Artificial Sequence
  LDLR targeting guide sequence portion
auucauggcgucggaaauga

SEQ ID NO: 862 - RNA, 20 nt, Artificial Sequence
  LDLR targeting guide sequence portion
auucauugacacgggcuuuc

SEQ ID NO: 863 - RNA, 20 nt, Artificial Sequence
  LDLR targeting guide sequence portion
auucauuuuuuaagagaugg

SEQ ID NO: 864 - RNA, 20 nt, Artificial Sequence
  LDLR targeting guide sequence portion
auucccguggucuccuugca

SEQ ID NO: 865 - RNA, 20 nt, Artificial Sequence
  LDLR targeting guide sequence portion
auucgggggugacagggcaa

SEQ ID NO: 866 - RNA, 20 nt, Artificial Sequence
  LDLR targeting guide sequence portion
auucucccaaaaagcguugc

SEQ ID NO: 867 - RNA, 20 nt, Artificial Sequence
  LDLR targeting guide sequence portion
auucucggggcccuguguag

SEQ ID NO: 868 - RNA, 20 nt, Artificial Sequence
  LDLR targeting guide sequence portion
auugacacgggcuuucccug

SEQ ID NO: 869 - RNA, 20 nt, Artificial Sequence
  LDLR targeting guide sequence portion
auugaucacaguaagacauu

SEQ ID NO: 870 - RNA, 20 nt, Artificial Sequence
  LDLR targeting guide sequence portion
auugcaugggcacuguccga

SEQ ID NO: 871 - RNA, 20 nt, Artificial Sequence
  LDLR targeting guide sequence portion
auugccaaucccuugugaca

SEQ ID NO: 872 - RNA, 20 nt, Artificial Sequence
  LDLR targeting guide sequence portion
auugccucugaaaugccucu

SEQ ID NO: 873 - RNA, 20 nt, Artificial Sequence
  LDLR targeting guide sequence portion
auuggcaauuguccccaggg

SEQ ID NO: 874 - RNA, 20 nt, Artificial Sequence
  LDLR targeting guide sequence portion
auuggggaagugaauggcuu

SEQ ID NO: 875 - RNA, 20 nt, Artificial Sequence
  LDLR targeting guide sequence portion
auugguggaugaggcagggc

SEQ ID NO: 876 - RNA, 20 nt, Artificial Sequence
  LDLR targeting guide sequence portion
auuguccccagggacaaaac

SEQ ID NO: 877 - RNA, 20 nt, Artificial Sequence
  LDLR targeting guide sequence portion
auugucgucuuuauguccgc

SEQ ID NO: 878 - RNA, 20 nt, Artificial Sequence
  LDLR targeting guide sequence portion
auugugucacgguggagaga

SEQ ID NO: 879 - RNA, 20 nt, Artificial Sequence
  LDLR targeting guide sequence portion
auuuacgugcuccgaaacca

SEQ ID NO: 880 - RNA, 20 nt, Artificial Sequence
  LDLR targeting guide sequence portion
auuuauuaagugccugagac

SEQ ID NO: 881 - RNA, 20 nt, Artificial Sequence
  LDLR targeting guide sequence portion
auuuauucaucugggaggca

SEQ ID NO: 882 - RNA, 20 nt, Artificial Sequence
  LDLR targeting guide sequence portion
auuuauuuuugcaaacccug

SEQ ID NO: 883 - RNA, 20 nt, Artificial Sequence
  LDLR targeting guide sequence portion
auuucagaaagaaccugaag

SEQ ID NO: 884 - RNA, 20 nt, Artificial Sequence
  LDLR targeting guide sequence portion
auuucagaggcaauaacccc

SEQ ID NO: 885 - RNA, 20 nt, Artificial Sequence
  LDLR targeting guide sequence portion
auuuccgacgccaugaaucc

SEQ ID NO: 886 - RNA, 20 nt, Artificial Sequence
  LDLR targeting guide sequence portion
auuucucuccaggaaguuuu

SEQ ID NO: 887 - RNA, 20 nt, Artificial Sequence
  LDLR targeting guide sequence portion
auuucugaaauagggucuuc

SEQ ID NO: 888 - RNA, 20 nt, Artificial Sequence
  LDLR targeting guide sequence portion
auuugaggcugucgugagcu

SEQ ID NO: 889 - RNA, 20 nt, Artificial Sequence
  LDLR targeting guide sequence portion
auuugcacgaacuggacugu

SEQ ID NO: 890 - RNA, 20 nt, Artificial Sequence
  LDLR targeting guide sequence portion
auuugcauagaaguggaagc

SEQ ID NO: 891 - RNA, 20 nt, Artificial Sequence
  LDLR targeting guide sequence portion
auuuggccagacacaggugc

SEQ ID NO: 892 - RNA, 20 nt, Artificial Sequence
  LDLR targeting guide sequence portion
auuuggugaaugaguuuggu

SEQ ID NO: 893 - RNA, 20 nt, Artificial Sequence
  LDLR targeting guide sequence portion
auuuguucagugacuauucu

SEQ ID NO: 894 - RNA, 20 nt, Artificial Sequence
  LDLR targeting guide sequence portion
auuuugcacuguuuucuguc

SEQ ID NO: 895 - RNA, 20 nt, Artificial Sequence
  LDLR targeting guide sequence portion
auuuugguuucuuccuuucc

SEQ ID NO: 896 - RNA, 20 nt, Artificial Sequence
  LDLR targeting guide sequence portion
auuuuugcaaacccugguug

SEQ ID NO: 897 - RNA, 20 nt, Artificial Sequence
  LDLR targeting guide sequence portion
caaaaaauccccacuaucug

SEQ ID NO: 898 - RNA, 20 nt, Artificial Sequence
  LDLR targeting guide sequence portion
caaaaaccuucuauacagug

SEQ ID NO: 899 - RNA, 20 nt, Artificial Sequence
  LDLR targeting guide sequence portion
caaaaagcguugcacacagu

SEQ ID NO: 900 - RNA, 20 nt, Artificial Sequence
  LDLR targeting guide sequence portion
caaaaaguuaaaaaucagcu

SEQ ID NO: 901 - RNA, 20 nt, Artificial Sequence
  LDLR targeting guide sequence portion
caaaacuuccuggagagaaa

SEQ ID NO: 902 - RNA, 20 nt, Artificial Sequence
  LDLR targeting guide sequence portion
caaaaucccaacccaagcca

SEQ ID NO: 903 - RNA, 20 nt, Artificial Sequence
  LDLR targeting guide sequence portion
caaacauaacaaaaaauccc

SEQ ID NO: 904 - RNA, 20 nt, Artificial Sequence
  LDLR targeting guide sequence portion
caaacauggaagaugaaagg

SEQ ID NO: 905 - RNA, 20 nt, Artificial Sequence
  LDLR targeting guide sequence portion
caaacccaccucgaaagaca

SEQ ID NO: 906 - RNA, 20 nt, Artificial Sequence
  LDLR targeting guide sequence portion
caaaccccuaaacucaggag

SEQ ID NO: 907 - RNA, 20 nt, Artificial Sequence
  LDLR targeting guide sequence portion
caaacccugguugcuguauu

SEQ ID NO: 908 - RNA, 20 nt, Artificial Sequence
  LDLR targeting guide sequence portion
caaacgauccagacuggagg

SEQ ID NO: 909 - RNA, 20 nt, Artificial Sequence
  LDLR targeting guide sequence portion
caaacucauucaccaaauga

SEQ ID NO: 910 - RNA, 20 nt, Artificial Sequence
  LDLR targeting guide sequence portion
caaagacagagaagaccaaa

SEQ ID NO: 911 - RNA, 20 nt, Artificial Sequence
  LDLR targeting guide sequence portion
caaagauuauuugcacgaac

SEQ ID NO: 912 - RNA, 20 nt, Artificial Sequence
  LDLR targeting guide sequence portion
caaagcauugccugccagag

SEQ ID NO: 913 - RNA, 20 nt, Artificial Sequence
  LDLR targeting guide sequence portion
caaagccgugaucgugaaua

SEQ ID NO: 914 - RNA, 20 nt, Artificial Sequence
  LDLR targeting guide sequence portion
caaagcucuggcaggcaaug

SEQ ID NO: 915 - RNA, 20 nt, Artificial Sequence
  LDLR targeting guide sequence portion
caaagugcaaacauaacaaa

SEQ ID NO: 916 - RNA, 20 nt, Artificial Sequence
  LDLR targeting guide sequence portion
caaauacagcaaccaggguu

SEQ ID NO: 917 - RNA, 20 nt, Artificial Sequence
  LDLR targeting guide sequence portion
caaaugaugccacuucccag

SEQ ID NO: 918 - RNA, 20 nt, Artificial Sequence
  LDLR targeting guide sequence portion
caaaugccaaauguacacag

SEQ ID NO: 919 - RNA, 20 nt, Artificial Sequence
  LDLR targeting guide sequence portion
caaaugccuccaagccauuc

SEQ ID NO: 920 - RNA, 20 nt, Artificial Sequence
  LDLR targeting guide sequence portion
caaaugccugagcucaaacc

SEQ ID NO: 921 - RNA, 20 nt, Artificial Sequence
  LDLR targeting guide sequence portion
caaauguacacaguguacaa

SEQ ID NO: 922 - RNA, 20 nt, Artificial Sequence
  LDLR targeting guide sequence portion
caaauucauuuuuuaagaga

SEQ ID NO: 923 - RNA, 20 nt, Artificial Sequence
  LDLR targeting guide sequence portion
caacacacaacagcagaugg

SEQ ID NO: 924 - RNA, 20 nt, Artificial Sequence
  LDLR targeting guide sequence portion
caacacacacgacagaaaac

SEQ ID NO: 925 - RNA, 20 nt, Artificial Sequence
  LDLR targeting guide sequence portion
caacagaugaagacccuauu

SEQ ID NO: 926 - RNA, 20 nt, Artificial Sequence
  LDLR targeting guide sequence portion
caacagcagauggcaccaac

SEQ ID NO: 927 - RNA, 20 nt, Artificial Sequence
  LDLR targeting guide sequence portion
caacaguaacacggcgauuu

SEQ ID NO: 928 - RNA, 20 nt, Artificial Sequence
  LDLR targeting guide sequence portion
caaccaauauacaaagugca

SEQ ID NO: 929 - RNA, 20 nt, Artificial Sequence
  LDLR targeting guide sequence portion
caaccaggguuugcaaaaau

SEQ ID NO: 930 - RNA, 20 nt, Artificial Sequence
  LDLR targeting guide sequence portion
caacccaagccauugcaugg

SEQ ID NO: 931 - RNA, 20 nt, Artificial Sequence
  LDLR targeting guide sequence portion
caaccugccccucucugucc

SEQ ID NO: 932 - RNA, 20 nt, Artificial Sequence
  LDLR targeting guide sequence portion
caacgacaagauuggggaag

SEQ ID NO: 933 - RNA, 20 nt, Artificial Sequence
  LDLR targeting guide sequence portion
caacgcuuuuugggagaaug

SEQ ID NO: 934 - RNA, 20 nt, Artificial Sequence
  LDLR targeting guide sequence portion
caacgggacccccuggcccu

SEQ ID NO: 935 - RNA, 20 nt, Artificial Sequence
  LDLR targeting guide sequence portion
caacggggacaucauucucc

SEQ ID NO: 936 - RNA, 20 nt, Artificial Sequence
  LDLR targeting guide sequence portion
caacguguuuaccucuucua

SEQ ID NO: 937 - RNA, 20 nt, Artificial Sequence
  LDLR targeting guide sequence portion
caacuccugaacucaaguga

SEQ ID NO: 938 - RNA, 20 nt, Artificial Sequence
  LDLR targeting guide sequence portion
caacucugaacugagaaagu

SEQ ID NO: 939 - RNA, 20 nt, Artificial Sequence
  LDLR targeting guide sequence portion
caagauuggggaagugaaug

SEQ ID NO: 940 - RNA, 20 nt, Artificial Sequence
  LDLR targeting guide sequence portion
caagccauucacuuccccaa

SEQ ID NO: 941 - RNA, 20 nt, Artificial Sequence
  LDLR targeting guide sequence portion
caagccauugcaugggcacu

SEQ ID NO: 942 - RNA, 20 nt, Artificial Sequence
  LDLR targeting guide sequence portion
caagccuugcuagacagcca

SEQ ID NO: 943 - RNA, 20 nt, Artificial Sequence
  LDLR targeting guide sequence portion
caaggagaccacgggaaugg

SEQ ID NO: 944 - RNA, 20 nt, Artificial Sequence
  LDLR targeting guide sequence portion
caaggccggcgaggucucag

SEQ ID NO: 945 - RNA, 20 nt, Artificial Sequence
  LDLR targeting guide sequence portion
caaggcuugcauagaagagg

SEQ ID NO: 946 - RNA, 20 nt, Artificial Sequence
  LDLR targeting guide sequence portion
caagggauuggcaauugucc

SEQ ID NO: 947 - RNA, 20 nt, Artificial Sequence
  LDLR targeting guide sequence portion
caagguaaccgggugucuca

SEQ ID NO: 948 - RNA, 20 nt, Artificial Sequence
  LDLR targeting guide sequence portion
caagugauccagcucagccu

SEQ ID NO: 949 - RNA, 20 nt, Artificial Sequence
  LDLR targeting guide sequence portion
caaguggcuuucaacacaca

SEQ ID NO: 950 - RNA, 20 nt, Artificial Sequence
  LDLR targeting guide sequence portion
caauaacccccuacacaggg

SEQ ID NO: 951 - RNA, 20 nt, Artificial Sequence
  LDLR targeting guide sequence portion
caaucccuugugacaucuuc

SEQ ID NO: 952 - RNA, 20 nt, Artificial Sequence
  LDLR targeting guide sequence portion
caauccucaaacauggaaga

SEQ ID NO: 953 - RNA, 20 nt, Artificial Sequence
  LDLR targeting guide sequence portion
caaucucuaagccaaacccc

SEQ ID NO: 954 - RNA, 20 nt, Artificial Sequence
  LDLR targeting guide sequence portion
caaucuugucguugaugggu

SEQ ID NO: 955 - RNA, 20 nt, Artificial Sequence
  LDLR targeting guide sequence portion
caaugaaugccggggacaga

SEQ ID NO: 956 - RNA, 20 nt, Artificial Sequence
  LDLR targeting guide sequence portion
caaugcuuuggucuucucug

SEQ ID NO: 957 - RNA, 20 nt, Artificial Sequence
  LDLR targeting guide sequence portion
caauggcaguucucgauauu

SEQ ID NO: 958 - RNA, 20 nt, Artificial Sequence
  LDLR targeting guide sequence portion
caauggcuuggguugggauu

SEQ ID NO: 959 - RNA, 20 nt, Artificial Sequence
  LDLR targeting guide sequence portion
caauugccaaucccuuguga

SEQ ID NO: 960 - RNA, 20 nt, Artificial Sequence
  LDLR targeting guide sequence portion
caauuguccccagggacaaa

SEQ ID NO: 961 - RNA, 20 nt, Artificial Sequence
  LDLR targeting guide sequence portion
cacaaaugccaaauguacac

SEQ ID NO: 962 - RNA, 20 nt, Artificial Sequence
  LDLR targeting guide sequence portion
cacaacagcagauggcacca

SEQ ID NO: 963 - RNA, 20 nt, Artificial Sequence
  LDLR targeting guide sequence portion
cacaagggauuggcaauugu

SEQ ID NO: 964 - RNA, 20 nt, Artificial Sequence
  LDLR targeting guide sequence portion
cacaauccucaaacauggaa

SEQ ID NO: 965 - RNA, 20 nt, Artificial Sequence
  LDLR targeting guide sequence portion
cacacaacagcagauggcac

SEQ ID NO: 966 - RNA, 20 nt, Artificial Sequence
  LDLR targeting guide sequence portion
cacacacgacagaaaacagu

SEQ ID NO: 967 - RNA, 20 nt, Artificial Sequence
  LDLR targeting guide sequence portion
cacacaguccaguucgugca

SEQ ID NO: 968 - RNA, 20 nt, Artificial Sequence
  LDLR targeting guide sequence portion
cacaccugggugcaggccac

SEQ ID NO: 969 - RNA, 20 nt, Artificial Sequence
  LDLR targeting guide sequence portion
cacacgacagaaaacagugc

SEQ ID NO: 970 - RNA, 20 nt, Artificial Sequence
  LDLR targeting guide sequence portion
cacaggcacgugccaccgua

SEQ ID NO: 971 - RNA, 20 nt, Artificial Sequence
  LDLR targeting guide sequence portion
cacagggccccgagaauagu

SEQ ID NO: 972 - RNA, 20 nt, Artificial Sequence
  LDLR targeting guide sequence portion
cacaggugccucacgccugu

SEQ ID NO: 973 - RNA, 20 nt, Artificial Sequence
  LDLR targeting guide sequence portion
cacaguaagacauucaggcu

SEQ ID NO: 974 - RNA, 20 nt, Artificial Sequence
  LDLR targeting guide sequence portion
cacaguccaguucgugcaaa

SEQ ID NO: 975 - RNA, 20 nt, Artificial Sequence
  LDLR targeting guide sequence portion
cacaguguacaacucugaac

SEQ ID NO: 976 - RNA, 20 nt, Artificial Sequence
  LDLR targeting guide sequence portion
cacaguguuuugucccuggg

SEQ ID NO: 977 - RNA, 20 nt, Artificial Sequence
  LDLR targeting guide sequence portion
cacauacccaucaacgacaa

SEQ ID NO: 978 - RNA, 20 nt, Artificial Sequence
  LDLR targeting guide sequence portion
caccaacgggacccccuggc

SEQ ID NO: 979 - RNA, 20 nt, Artificial Sequence
  LDLR targeting guide sequence portion
caccaaucucuaagccaaac

SEQ ID NO: 980 - RNA, 20 nt, Artificial Sequence
  LDLR targeting guide sequence portion
caccacggauucagccagau

SEQ ID NO: 981 - RNA, 20 nt, Artificial Sequence
  LDLR targeting guide sequence portion
caccaggcugguguccugac

SEQ ID NO: 982 - RNA, 20 nt, Artificial Sequence
  LDLR targeting guide sequence portion
cacccagguguggcugucag

SEQ ID NO: 983 - RNA, 20 nt, Artificial Sequence
  LDLR targeting guide sequence portion
cacccagugucuuucgaggu

SEQ ID NO: 984 - RNA, 20 nt, Artificial Sequence
  LDLR targeting guide sequence portion
cacccaucucccagaagcca

SEQ ID NO: 985 - RNA, 20 nt, Artificial Sequence
  LDLR targeting guide sequence portion
cacccccgaaucaugaccca

SEQ ID NO: 986 - RNA, 20 nt, Artificial Sequence
  LDLR targeting guide sequence portion
cacccgguuaccuuggccgu

SEQ ID NO: 987 - RNA, 20 nt, Artificial Sequence
  LDLR targeting guide sequence portion
cacccuuaauauuuauuaag

SEQ ID NO: 988 - RNA, 20 nt, Artificial Sequence
  LDLR targeting guide sequence portion
caccgagaccaaacucauuc

SEQ ID NO: 989 - RNA, 20 nt, Artificial Sequence
  LDLR targeting guide sequence portion
caccguacccagcugauuuu

SEQ ID NO: 990 - RNA, 20 nt, Artificial Sequence
  LDLR targeting guide sequence portion
caccgugacacaauccucaa

SEQ ID NO: 991 - RNA, 20 nt, Artificial Sequence
  LDLR targeting guide sequence portion
caccgugcauguuuuaaaca

SEQ ID NO: 992 - RNA, 20 nt, Artificial Sequence
  LDLR targeting guide sequence portion
caccuagugcuuccacuucu

SEQ ID NO: 993 - RNA, 20 nt, Artificial Sequence
  LDLR targeting guide sequence portion
caccucagccucgccaugcc

SEQ ID NO: 994 - RNA, 20 nt, Artificial Sequence
  LDLR targeting guide sequence portion
caccuccauuucucuccagg

SEQ ID NO: 995 - RNA, 20 nt, Artificial Sequence
  LDLR targeting guide sequence portion
caccucgaaagacacugggu

SEQ ID NO: 996 - RNA, 20 nt, Artificial Sequence
  LDLR targeting guide sequence portion
caccugggugcaggccacgu

SEQ ID NO: 997 - RNA, 20 nt, Artificial Sequence
  LDLR targeting guide sequence portion
caccugugucuggccaaauu

SEQ ID NO: 998 - RNA, 20 nt, Artificial Sequence
  LDLR targeting guide sequence portion
cacgaacuggacugugugca

SEQ ID NO: 999 - RNA, 20 nt, Artificial Sequence
  LDLR targeting guide sequence portion
cacgacagaaaacagugcaa

SEQ ID NO: 1000 - RNA, 20 nt, Artificial Sequence
  LDLR targeting guide sequence portion
cacgacagccucaaaugccu

SEQ ID NO: 1001 - RNA, 20 nt, Artificial Sequence
  LDLR targeting guide sequence portion
cacgaggaaaggaagaaacc

SEQ ID NO: 1002 - RNA, 20 nt, Artificial Sequence
  LDLR targeting guide sequence portion
cacgaucacggcuuugaagu

SEQ ID NO: 1003 - RNA, 20 nt, Artificial Sequence
  LDLR targeting guide sequence portion
cacgccacgucauccuccag

SEQ ID NO: 1004 - RNA, 20 nt, Artificial Sequence
  LDLR targeting guide sequence portion
cacgcgggagucugacggag

SEQ ID NO: 1005 - RNA, 20 nt, Artificial Sequence
  LDLR targeting guide sequence portion
cacggauucagccagaucau

SEQ ID NO: 1006 - RNA, 20 nt, Artificial Sequence
  LDLR targeting guide sequence portion
cacggccaagguaaccgggu

SEQ ID NO: 1007 - RNA, 20 nt, Artificial Sequence
  LDLR targeting guide sequence portion
cacggcgauuucagaaagaa

SEQ ID NO: 1008 - RNA, 20 nt, Artificial Sequence
  LDLR targeting guide sequence portion
cacggcuuugaagucccggu

SEQ ID NO: 1009 - RNA, 20 nt, Artificial Sequence
  LDLR targeting guide sequence portion
cacgggaauggaagugggua

SEQ ID NO: 1010 - RNA, 20 nt, Artificial Sequence
  LDLR targeting guide sequence portion
cacgggcuuucccuggccug

SEQ ID NO: 1011 - RNA, 20 nt, Artificial Sequence
  LDLR targeting guide sequence portion
cacggugaggccgggcgcag

SEQ ID NO: 1012 - RNA, 20 nt, Artificial Sequence
  LDLR targeting guide sequence portion
cacgguggagagaaacucaa

SEQ ID NO: 1013 - RNA, 20 nt, Artificial Sequence
  LDLR targeting guide sequence portion
cacguaaaugcgucccugua

SEQ ID NO: 1014 - RNA, 20 nt, Artificial Sequence
  LDLR targeting guide sequence portion
cacgucauccuccagacuga

SEQ ID NO: 1015 - RNA, 20 nt, Artificial Sequence
  LDLR targeting guide sequence portion
cacgugccaccguacccagc

SEQ ID NO: 1016 - RNA, 20 nt, Artificial Sequence
  LDLR targeting guide sequence portion
cacguggccugcacccaggu

SEQ ID NO: 1017 - RNA, 20 nt, Artificial Sequence
  LDLR targeting guide sequence portion
cacguguccucacggccaag

SEQ ID NO: 1018 - RNA, 20 nt, Artificial Sequence
  LDLR targeting guide sequence portion
cacguugacuccugaguuua

SEQ ID NO: 1019 - RNA, 20 nt, Artificial Sequence
  LDLR targeting guide sequence portion
cacuaggugggcggacauaa

SEQ ID NO: 1020 - RNA, 20 nt, Artificial Sequence
  LDLR targeting guide sequence portion
cacuaucuguacagggacgc

SEQ ID NO: 1021 - RNA, 20 nt, Artificial Sequence
  LDLR targeting guide sequence portion
cacucauacauacaacgggg

SEQ ID NO: 1022 - RNA, 20 nt, Artificial Sequence
  LDLR targeting guide sequence portion
cacugaacaaauacagcaac

SEQ ID NO: 1023 - RNA, 20 nt, Artificial Sequence
  LDLR targeting guide sequence portion
cacugauguccggagagaca

SEQ ID NO: 1024 - RNA, 20 nt, Artificial Sequence
  LDLR targeting guide sequence portion
cacugcgcccggccucaccg

SEQ ID NO: 1025 - RNA, 20 nt, Artificial Sequence
  LDLR targeting guide sequence portion
cacugggugggucaugauuc

SEQ ID NO: 1026 - RNA, 20 nt, Artificial Sequence
  LDLR targeting guide sequence portion
cacuggucacccuuaauauu

SEQ ID NO: 1027 - RNA, 20 nt, Artificial Sequence
  LDLR targeting guide sequence portion
cacuguauagaagguuuuug

SEQ ID NO: 1028 - RNA, 20 nt, Artificial Sequence
  LDLR targeting guide sequence portion
cacuguccgaagccuguucu

SEQ ID NO: 1029 - RNA, 20 nt, Artificial Sequence
  LDLR targeting guide sequence portion
cacugucucuccggacauca

SEQ ID NO: 1030 - RNA, 20 nt, Artificial Sequence
  LDLR targeting guide sequence portion
cacuguguacauuuggcauu

SEQ ID NO: 1031 - RNA, 20 nt, Artificial Sequence
  LDLR targeting guide sequence portion
cacuguuuucugucgugugu

SEQ ID NO: 1032 - RNA, 20 nt, Artificial Sequence
  LDLR targeting guide sequence portion
cacuuaauaaauauuaaggg

SEQ ID NO: 1033 - RNA, 20 nt, Artificial Sequence
  LDLR targeting guide sequence portion
cacuuccauucccguggucu

SEQ ID NO: 1034 - RNA, 20 nt, Artificial Sequence
  LDLR targeting guide sequence portion
cacuucccagaggcagagcc

SEQ ID NO: 1035 - RNA, 20 nt, Artificial Sequence
  LDLR targeting guide sequence portion
cacuuccccaaucuugucgu

SEQ ID NO: 1036 - RNA, 20 nt, Artificial Sequence
  LDLR targeting guide sequence portion
cacuucuaugcaaaugccuc

SEQ ID NO: 1037 - RNA, 20 nt, Artificial Sequence
  LDLR targeting guide sequence portion
cacuugcuucucugggccug

SEQ ID NO: 1038 - RNA, 20 nt, Artificial Sequence
  LDLR targeting guide sequence portion
cacuuucucaguucagaguu

SEQ ID NO: 1039 - RNA, 20 nt, Artificial Sequence
  LDLR targeting guide sequence portion
cacuuugggaggcugagcug

SEQ ID NO: 1040 - RNA, 20 nt, Artificial Sequence
  LDLR targeting guide sequence portion
cacuuuguauauugguugaa

SEQ ID NO: 1041 - RNA, 20 nt, Artificial Sequence
  LDLR targeting guide sequence portion
cacuuuuuaaaccacuguau

SEQ ID NO: 1042 - RNA, 20 nt, Artificial Sequence
  LDLR targeting guide sequence portion
cagaaaacagugcaaaauaa

SEQ ID NO: 1043 - RNA, 20 nt, Artificial Sequence
  LDLR targeting guide sequence portion
cagaaagaaccugaaguccc

SEQ ID NO: 1044 - RNA, 20 nt, Artificial Sequence
  LDLR targeting guide sequence portion
cagaaaggcuuaucacgguu

SEQ ID NO: 1045 - RNA, 20 nt, Artificial Sequence
  LDLR targeting guide sequence portion
cagaacaggcuucggacagu

SEQ ID NO: 1046 - RNA, 20 nt, Artificial Sequence
  LDLR targeting guide sequence portion
cagaacccuuccugagaccu

SEQ ID NO: 1047 - RNA, 20 nt, Artificial Sequence
  LDLR targeting guide sequence portion
cagaagccacucauacauac

SEQ ID NO: 1048 - RNA, 20 nt, Artificial Sequence
  LDLR targeting guide sequence portion
cagacacaggugccucacgc

SEQ ID NO: 1049 - RNA, 20 nt, Artificial Sequence
  LDLR targeting guide sequence portion
cagacucccgcgugaagaug

SEQ ID NO: 1050 - RNA, 20 nt, Artificial Sequence
  LDLR targeting guide sequence portion
cagagaagaccaaagcauug

SEQ ID NO: 1051 - RNA, 20 nt, Artificial Sequence
  LDLR targeting guide sequence portion
cagagaagcaaguggcuuuc

SEQ ID NO: 1052 - RNA, 20 nt, Artificial Sequence
  LDLR targeting guide sequence portion
cagagaggggcagguugacc

SEQ ID NO: 1053 - RNA, 20 nt, Artificial Sequence
  LDLR targeting guide sequence portion
cagagccugagucacugguc

SEQ ID NO: 1054 - RNA, 20 nt, Artificial Sequence
  LDLR targeting guide sequence portion
cagaggcagagccugaguca

SEQ ID NO: 1055 - RNA, 20 nt, Artificial Sequence
  LDLR targeting guide sequence portion
cagaggccaugggcugcuga

SEQ ID NO: 1056 - RNA, 20 nt, Artificial Sequence
  LDLR targeting guide sequence portion
cagauaguggggauuuuuug

SEQ ID NO: 1057 - RNA, 20 nt, Artificial Sequence
  LDLR targeting guide sequence portion
cagaucauuuccgacgccau

SEQ ID NO: 1058 - RNA, 20 nt, Artificial Sequence
  LDLR targeting guide sequence portion
cagaugaagacccuauuuca

SEQ ID NO: 1059 - RNA, 20 nt, Artificial Sequence
  LDLR targeting guide sequence portion
cagauggcaccaacgggacc

SEQ ID NO: 1060 - RNA, 20 nt, Artificial Sequence
  LDLR targeting guide sequence portion
cagauggucagucuggagga

SEQ ID NO: 1061 - RNA, 20 nt, Artificial Sequence
  LDLR targeting guide sequence portion
cagauguucacgccacguca

SEQ ID NO: 1062 - RNA, 20 nt, Artificial Sequence
  LDLR targeting guide sequence portion
cagcaaccaggguuugcaaa

SEQ ID NO: 1063 - RNA, 20 nt, Artificial Sequence
  LDLR targeting guide sequence portion
cagcagauggcaccaacggg

SEQ ID NO: 1064 - RNA, 20 nt, Artificial Sequence
  LDLR targeting guide sequence portion
cagcagcccauggccucugg

SEQ ID NO: 1065 - RNA, 20 nt, Artificial Sequence
  LDLR targeting guide sequence portion
cagccacaccugggugcagg

SEQ ID NO: 1066 - RNA, 20 nt, Artificial Sequence
  LDLR targeting guide sequence portion
cagccagaucauuuccgacg

SEQ ID NO: 1067 - RNA, 20 nt, Artificial Sequence
  LDLR targeting guide sequence portion
cagccagguuagccuuugcc

SEQ ID NO: 1068 - RNA, 20 nt, Artificial Sequence
  LDLR targeting guide sequence portion
cagcccauggccucuggcca

SEQ ID NO: 1069 - RNA, 20 nt, Artificial Sequence
  LDLR targeting guide sequence portion
cagccucaaaugccugagcu

SEQ ID NO: 1070 - RNA, 20 nt, Artificial Sequence
  LDLR targeting guide sequence portion
cagccuccgucagacucccg

SEQ ID NO: 1071 - RNA, 20 nt, Artificial Sequence
  LDLR targeting guide sequence portion
cagccucgccaugccuggcc

SEQ ID NO: 1072 - RNA, 20 nt, Artificial Sequence
  LDLR targeting guide sequence portion
cagccuggugcccauccucc

SEQ ID NO: 1073 - RNA, 20 nt, Artificial Sequence
  LDLR targeting guide sequence portion
cagcuggguacgguggcacg

SEQ ID NO: 1074 - RNA, 20 nt, Artificial Sequence
  LDLR targeting guide sequence portion
caggaaagggauucauggcg

SEQ ID NO: 1075 - RNA, 20 nt, Artificial Sequence
  LDLR targeting guide sequence portion
caggaaggguucugggcagg

SEQ ID NO: 1076 - RNA, 20 nt, Artificial Sequence
  LDLR targeting guide sequence portion
caggaaguuuugaguuucuc

SEQ ID NO: 1077 - RNA, 20 nt, Artificial Sequence
  LDLR targeting guide sequence portion
caggacaccagccuggugcc

SEQ ID NO: 1078 - RNA, 20 nt, Artificial Sequence
  LDLR targeting guide sequence portion
caggagucaacguguuuacc

SEQ ID NO: 1079 - RNA, 20 nt, Artificial Sequence
  LDLR targeting guide sequence portion
caggaguuggagaccaggcc

SEQ ID NO: 1080 - RNA, 20 nt, Artificial Sequence
  LDLR targeting guide sequence portion
caggaugacaccuccauuuc

SEQ ID NO: 1081 - RNA, 20 nt, Artificial Sequence
  LDLR targeting guide sequence portion
caggcaaugcuuuggucuuc

SEQ ID NO: 1082 - RNA, 20 nt, Artificial Sequence
  LDLR targeting guide sequence portion
caggcacgugccaccguacc

SEQ ID NO: 1083 - RNA, 20 nt, Artificial Sequence
  LDLR targeting guide sequence portion
caggcacuuaauaaauauua

SEQ ID NO: 1084 - RNA, 20 nt, Artificial Sequence
  LDLR targeting guide sequence portion
caggcagauguucacgccac

SEQ ID NO: 1085 - RNA, 20 nt, Artificial Sequence
  LDLR targeting guide sequence portion
caggcauggcgaggcugagg

SEQ ID NO: 1086 - RNA, 20 nt, Artificial Sequence
  LDLR targeting guide sequence portion
caggcauuugaggcugucgu

SEQ ID NO: 1087 - RNA, 20 nt, Artificial Sequence
  LDLR targeting guide sequence portion
caggccacguguccucacgg

SEQ ID NO: 1088 - RNA, 20 nt, Artificial Sequence
  LDLR targeting guide sequence portion
caggccagggaaagcccgug

SEQ ID NO: 1089 - RNA, 20 nt, Artificial Sequence
  LDLR targeting guide sequence portion
caggcccagagaagcaagug

SEQ ID NO: 1090 - RNA, 20 nt, Artificial Sequence
  LDLR targeting guide sequence portion
caggcccggggggaccagga

SEQ ID NO: 1091 - RNA, 20 nt, Artificial Sequence
  LDLR targeting guide sequence portion
caggccugagcaacaaagcg

SEQ ID NO: 1092 - RNA, 20 nt, Artificial Sequence
  LDLR targeting guide sequence portion
caggccuggucuccaacucc

SEQ ID NO: 1093 - RNA, 20 nt, Artificial Sequence
  LDLR targeting guide sequence portion
caggcgugaggcaccugugu

SEQ ID NO: 1094 - RNA, 20 nt, Artificial Sequence
  LDLR targeting guide sequence portion
caggcucugccucugggaag

SEQ ID NO: 1095 - RNA, 20 nt, Artificial Sequence
  LDLR targeting guide sequence portion
caggcuggaaagcaguggca

SEQ ID NO: 1096 - RNA, 20 nt, Artificial Sequence
  LDLR targeting guide sequence portion
caggcugguguccugacagc

SEQ ID NO: 1097 - RNA, 20 nt, Artificial Sequence
  LDLR targeting guide sequence portion
caggcuucggacagugccca

SEQ ID NO: 1098 - RNA, 20 nt, Artificial Sequence
  LDLR targeting guide sequence portion
cagggaaagcccgugucaau

SEQ ID NO: 1099 - RNA, 20 nt, Artificial Sequence
  LDLR targeting guide sequence portion
cagggaaccgugauaagccu

SEQ ID NO: 1100 - RNA, 20 nt, Artificial Sequence
  LDLR targeting guide sequence portion
cagggacgcauuuacgugcu

SEQ ID NO: 1101 - RNA, 20 nt, Artificial Sequence
  LDLR targeting guide sequence portion
cagggacgggacuccaggca

SEQ ID NO: 1102 - RNA, 20 nt, Artificial Sequence
  LDLR targeting guide sequence portion
cagggcaaaggcuaaccugg

SEQ ID NO: 1103 - RNA, 20 nt, Artificial Sequence
  LDLR targeting guide sequence portion
cagggccagggggucccguu

SEQ ID NO: 1104 - RNA, 20 nt, Artificial Sequence
  LDLR targeting guide sequence portion
cagggccccgagaauaguca

SEQ ID NO: 1105 - RNA, 20 nt, Artificial Sequence
  LDLR targeting guide sequence portion
cagggggucccguuggugcc

SEQ ID NO: 1106 - RNA, 20 nt, Artificial Sequence
  LDLR targeting guide sequence portion
cagguuagccuuugcccugu

SEQ ID NO: 1107 - RNA, 20 nt, Artificial Sequence
  LDLR targeting guide sequence portion
cagguucuuucugaaaucgc

SEQ ID NO: 1108 - RNA, 20 nt, Artificial Sequence
  LDLR targeting guide sequence portion
cagguugaccgggacuucaa

SEQ ID NO: 1109 - RNA, 20 nt, Artificial Sequence
  LDLR targeting guide sequence portion
caguaacacggcgauuucag

SEQ ID NO: 1110 - RNA, 20 nt, Artificial Sequence
  LDLR targeting guide sequence portion
caguaagacauucaggcuac

SEQ ID NO: 1111 - RNA, 20 nt, Artificial Sequence
  LDLR targeting guide sequence portion
caguccaguucgugcaaaua

SEQ ID NO: 1112 - RNA, 20 nt, Artificial Sequence
  LDLR targeting guide sequence portion
cagucuggaggaugacgugg

SEQ ID NO: 1113 - RNA, 20 nt, Artificial Sequence
  LDLR targeting guide sequence portion
cagucuggaucguuugacgg

SEQ ID NO: 1114 - RNA, 20 nt, Artificial Sequence
  LDLR targeting guide sequence portion
cagugacagccuccgucaga

SEQ ID NO: 1115 - RNA, 20 nt, Artificial Sequence
  LDLR targeting guide sequence portion
cagugacuauucucggggcc

SEQ ID NO: 1116 - RNA, 20 nt, Artificial Sequence
  LDLR targeting guide sequence portion
cagugacucaggcucugccu

SEQ ID NO: 1117 - RNA, 20 nt, Artificial Sequence
  LDLR targeting guide sequence portion
cagugcaaaauaauaacaca

SEQ ID NO: 1118 - RNA, 20 nt, Artificial Sequence
  LDLR targeting guide sequence portion
cagugcaacaguaacacggc

SEQ ID NO: 1119 - RNA, 20 nt, Artificial Sequence
  LDLR targeting guide sequence portion
cagugcagggaaccgugaua

SEQ ID NO: 1120 - RNA, 20 nt, Artificial Sequence
  LDLR targeting guide sequence portion
cagugcccaugcaauggcuu

SEQ ID NO: 1121 - RNA, 20 nt, Artificial Sequence
  LDLR targeting guide sequence portion
cagugguuuaaaaagugaca

SEQ ID NO: 1122 - RNA, 20 nt, Artificial Sequence
  LDLR targeting guide sequence portion
caguguacaacucugaacug

SEQ ID NO: 1123 - RNA, 20 nt, Artificial Sequence
  LDLR targeting guide sequence portion
cagugucuuucgaggugggu

SEQ ID NO: 1124 - RNA, 20 nt, Artificial Sequence
  LDLR targeting guide sequence portion
caguguuuugucccugggga

SEQ ID NO: 1125 - RNA, 20 nt, Artificial Sequence
  LDLR targeting guide sequence portion
caguucagaguuguacacug

SEQ ID NO: 1126 - RNA, 20 nt, Artificial Sequence
  LDLR targeting guide sequence portion
caguucgugcaaauaaucuu

SEQ ID NO: 1127 - RNA, 20 nt, Artificial Sequence
  LDLR targeting guide sequence portion
caguucucgauauucacgau

SEQ ID NO: 1128 - RNA, 20 nt, Artificial Sequence
  LDLR targeting guide sequence portion
caguuucaaccaauauacaa

SEQ ID NO: 1129 - RNA, 20 nt, Artificial Sequence
  LDLR targeting guide sequence portion
cauaaagaagaggcauuuca

SEQ ID NO: 1130 - RNA, 20 nt, Artificial Sequence
  LDLR targeting guide sequence portion
cauaaagacgacaauggcag

SEQ ID NO: 1131 - RNA, 20 nt, Artificial Sequence
  LDLR targeting guide sequence portion
cauaacaaaaaauccccacu

SEQ ID NO: 1132 - RNA, 20 nt, Artificial Sequence
  LDLR targeting guide sequence portion
cauaaucauagcucacgaca

SEQ ID NO: 1133 - RNA, 20 nt, Artificial Sequence
  LDLR targeting guide sequence portion
cauacaacggggacaucauu

SEQ ID NO: 1134 - RNA, 20 nt, Artificial Sequence
  LDLR targeting guide sequence portion
cauacauacaacggggacau

SEQ ID NO: 1135 - RNA, 20 nt, Artificial Sequence
  LDLR targeting guide sequence portion
cauacccaucaacgacaaga

SEQ ID NO: 1136 - RNA, 20 nt, Artificial Sequence
  LDLR targeting guide sequence portion
cauagaagagguaaacacgu

SEQ ID NO: 1137 - RNA, 20 nt, Artificial Sequence
  LDLR targeting guide sequence portion
cauagaaguggaagcacuag

SEQ ID NO: 1138 - RNA, 20 nt, Artificial Sequence
  LDLR targeting guide sequence portion
cauagcucacgacagccuca

SEQ ID NO: 1139 - RNA, 20 nt, Artificial Sequence
  LDLR targeting guide sequence portion
caucaacgacaagauugggg

SEQ ID NO: 1140 - RNA, 20 nt, Artificial Sequence
  LDLR targeting guide sequence portion
caucagcagcccauggccuc

SEQ ID NO: 1141 - RNA, 20 nt, Artificial Sequence
  LDLR targeting guide sequence portion
caucagugcaacaguaacac

SEQ ID NO: 1142 - RNA, 20 nt, Artificial Sequence
  LDLR targeting guide sequence portion
caucauucucccaaaaagcg

SEQ ID NO: 1143 - RNA, 20 nt, Artificial Sequence
  LDLR targeting guide sequence portion
caucauuuggugaaugaguu

SEQ ID NO: 1144 - RNA, 20 nt, Artificial Sequence
  LDLR targeting guide sequence portion
cauccaccaaucucuaagcc

SEQ ID NO: 1145 - RNA, 20 nt, Artificial Sequence
  LDLR targeting guide sequence portion
caucccaacacacacgacag

SEQ ID NO: 1146 - RNA, 20 nt, Artificial Sequence
  LDLR targeting guide sequence portion
cauccccuccccuuucaucu

SEQ ID NO: 1147 - RNA, 20 nt, Artificial Sequence
  LDLR targeting guide sequence portion
cauccuccagacugaccauc

SEQ ID NO: 1148 - RNA, 20 nt, Artificial Sequence
  LDLR targeting guide sequence portion
cauccucccgaccccuaccc

SEQ ID NO: 1149 - RNA, 20 nt, Artificial Sequence
  LDLR targeting guide sequence portion
cauccugguccccccgggcc

SEQ ID NO: 1150 - RNA, 20 nt, Artificial Sequence
  LDLR targeting guide sequence portion
caucucccagaagccacuca

SEQ ID NO: 1151 - RNA, 20 nt, Artificial Sequence
  LDLR targeting guide sequence portion
caucucuuaaaaaaugaauu

SEQ ID NO: 1152 - RNA, 20 nt, Artificial Sequence
  LDLR targeting guide sequence portion
caucugccuggagucccguc

SEQ ID NO: 1153 - RNA, 20 nt, Artificial Sequence
  LDLR targeting guide sequence portion
caucugcuguuguguguuga

SEQ ID NO: 1154 - RNA, 20 nt, Artificial Sequence
  LDLR targeting guide sequence portion
caucugggaggcagaacagg

SEQ ID NO: 1155 - RNA, 20 nt, Artificial Sequence
  LDLR targeting guide sequence portion
caucuucacgcgggagucug

SEQ ID NO: 1156 - RNA, 20 nt, Artificial Sequence
  LDLR targeting guide sequence portion
caucuuccauguuugaggau

SEQ ID NO: 1157 - RNA, 20 nt, Artificial Sequence
  LDLR targeting guide sequence portion
caugaaucccuuuccuggcu

SEQ ID NO: 1158 - RNA, 20 nt, Artificial Sequence
  LDLR targeting guide sequence portion
caugacccacccagugucuu

SEQ ID NO: 1159 - RNA, 20 nt, Artificial Sequence
  LDLR targeting guide sequence portion
caugauucgggggugacagg

SEQ ID NO: 1160 - RNA, 20 nt, Artificial Sequence
  LDLR targeting guide sequence portion
caugcaauggcuuggguugg

SEQ ID NO: 1161 - RNA, 20 nt, Artificial Sequence
  LDLR targeting guide sequence portion
caugcacggugaggccgggc

SEQ ID NO: 1162 - RNA, 20 nt, Artificial Sequence
  LDLR targeting guide sequence portion
caugcauggugcaucagcag

SEQ ID NO: 1163 - RNA, 20 nt, Artificial Sequence
  LDLR targeting guide sequence portion
caugccuggccagaggccau

SEQ ID NO: 1164 - RNA, 20 nt, Artificial Sequence
  LDLR targeting guide sequence portion
cauggaagaugaaaggggag

SEQ ID NO: 1165 - RNA, 20 nt, Artificial Sequence
  LDLR targeting guide sequence portion
cauggccucuggccaggcau

SEQ ID NO: 1166 - RNA, 20 nt, Artificial Sequence
  LDLR targeting guide sequence portion
cauggcgaggcugagguggg

SEQ ID NO: 1167 - RNA, 20 nt, Artificial Sequence
  LDLR targeting guide sequence portion
cauggcgucggaaaugaucu

SEQ ID NO: 1168 - RNA, 20 nt, Artificial Sequence
  LDLR targeting guide sequence portion
caugggcacuguccgaagcc

SEQ ID NO: 1169 - RNA, 20 nt, Artificial Sequence
  LDLR targeting guide sequence portion
caugggcugcugaugcacca

SEQ ID NO: 1170 - RNA, 20 nt, Artificial Sequence
  LDLR targeting guide sequence portion
cauggugcaucagcagccca

SEQ ID NO: 1171 - RNA, 20 nt, Artificial Sequence
  LDLR targeting guide sequence portion
cauguuugaggauuguguca

SEQ ID NO: 1172 - RNA, 20 nt, Artificial Sequence
  LDLR targeting guide sequence portion
cauguuuuaaacacauaccc

SEQ ID NO: 1173 - RNA, 20 nt, Artificial Sequence
  LDLR targeting guide sequence portion
cauucaccaaaugaugccac

SEQ ID NO: 1174 - RNA, 20 nt, Artificial Sequence
  LDLR targeting guide sequence portion
cauucacuuccccaaucuug

SEQ ID NO: 1175 - RNA, 20 nt, Artificial Sequence
  LDLR targeting guide sequence portion
cauucaggcuacaaaaaccu

SEQ ID NO: 1176 - RNA, 20 nt, Artificial Sequence
  LDLR targeting guide sequence portion
cauucauugacacgggcuuu

SEQ ID NO: 1177 - RNA, 20 nt, Artificial Sequence
  LDLR targeting guide sequence portion
cauucccguggucuccuugc

SEQ ID NO: 1178 - RNA, 20 nt, Artificial Sequence
  LDLR targeting guide sequence portion
cauucucccaaaaagcguug

SEQ ID NO: 1179 - RNA, 20 nt, Artificial Sequence
  LDLR targeting guide sequence portion
cauugacacgggcuuucccu

SEQ ID NO: 1180 - RNA, 20 nt, Artificial Sequence
  LDLR targeting guide sequence portion
cauugcaugggcacuguccg

SEQ ID NO: 1181 - RNA, 20 nt, Artificial Sequence
  LDLR targeting guide sequence portion
cauugccugccagagcuuug

SEQ ID NO: 1182 - RNA, 20 nt, Artificial Sequence
  LDLR targeting guide sequence portion
cauugucgucuuuauguccg

SEQ ID NO: 1183 - RNA, 20 nt, Artificial Sequence
  LDLR targeting guide sequence portion
cauuuacgugcuccgaaacc

SEQ ID NO: 1184 - RNA, 20 nt, Artificial Sequence
  LDLR targeting guide sequence portion
cauuucagaggcaauaaccc

SEQ ID NO: 1185 - RNA, 20 nt, Artificial Sequence
  LDLR targeting guide sequence portion
cauuuccgacgccaugaauc

SEQ ID NO: 1186 - RNA, 20 nt, Artificial Sequence
  LDLR targeting guide sequence portion
cauuucucuccaggaaguuu

SEQ ID NO: 1187 - RNA, 20 nt, Artificial Sequence
  LDLR targeting guide sequence portion
cauuugaggcugucgugagc

SEQ ID NO: 1188 - RNA, 20 nt, Artificial Sequence
  LDLR targeting guide sequence portion
cauuugcauagaaguggaag

SEQ ID NO: 1189 - RNA, 20 nt, Artificial Sequence
  LDLR targeting guide sequence portion
cauuuggugaaugaguuugg

SEQ ID NO: 1190 - RNA, 20 nt, Artificial Sequence
  LDLR targeting guide sequence portion
cauuuuuuaagagauggggu

SEQ ID NO: 1191 - RNA, 20 nt, Artificial Sequence
  LDLR targeting guide sequence portion
ccaaaaagcguugcacacag

SEQ ID NO: 1192 - RNA, 20 nt, Artificial Sequence
  LDLR targeting guide sequence portion
ccaaaaaguuaaaaaucagc

SEQ ID NO: 1193 - RNA, 20 nt, Artificial Sequence
  LDLR targeting guide sequence portion
ccaaaaucccaacccaagcc

SEQ ID NO: 1194 - RNA, 20 nt, Artificial Sequence
  LDLR targeting guide sequence portion
ccaaaccccuaaacucagga

SEQ ID NO: 1195 - RNA, 20 nt, Artificial Sequence
  LDLR targeting guide sequence portion
ccaaacucauucaccaaaug

SEQ ID NO: 1196 - RNA, 20 nt, Artificial Sequence
  LDLR targeting guide sequence portion
ccaaagcauugccugccaga

SEQ ID NO: 1197 - RNA, 20 nt, Artificial Sequence
  LDLR targeting guide sequence portion
ccaaaugaugccacuuccca

SEQ ID NO: 1198 - RNA, 20 nt, Artificial Sequence
  LDLR targeting guide sequence portion
ccaaauguacacaguguaca

SEQ ID NO: 1199 - RNA, 20 nt, Artificial Sequence
  LDLR targeting guide sequence portion
ccaaauucauuuuuuaagag

SEQ ID NO: 1200 - RNA, 20 nt, Artificial Sequence
  LDLR targeting guide sequence portion
ccaacacacacgacagaaaa

SEQ ID NO: 1201 - RNA, 20 nt, Artificial Sequence
  LDLR targeting guide sequence portion
ccaacccaagccauugcaug

SEQ ID NO: 1202 - RNA, 20 nt, Artificial Sequence
  LDLR targeting guide sequence portion
ccaacgggacccccuggccc

SEQ ID NO: 1203 - RNA, 20 nt, Artificial Sequence
  LDLR targeting guide sequence portion
ccaacuccugaacucaagug

SEQ ID NO: 1204 - RNA, 20 nt, Artificial Sequence
  LDLR targeting guide sequence portion
ccaagccauucacuucccca

SEQ ID NO: 1205 - RNA, 20 nt, Artificial Sequence
  LDLR targeting guide sequence portion
ccaagccauugcaugggcac

SEQ ID NO: 1206 - RNA, 20 nt, Artificial Sequence
  LDLR targeting guide sequence portion
ccaagguaaccgggugucuc

SEQ ID NO: 1207 - RNA, 20 nt, Artificial Sequence
  LDLR targeting guide sequence portion
ccaauauacaaagugcaaac

SEQ ID NO: 1208 - RNA, 20 nt, Artificial Sequence
  LDLR targeting guide sequence portion
ccaaucccuugugacaucuu

SEQ ID NO: 1209 - RNA, 20 nt, Artificial Sequence
  LDLR targeting guide sequence portion
ccaaucucuaagccaaaccc

SEQ ID NO: 1210 - RNA, 20 nt, Artificial Sequence
  LDLR targeting guide sequence portion
ccaaucuugucguugauggg

SEQ ID NO: 1211 - RNA, 20 nt, Artificial Sequence
  LDLR targeting guide sequence portion
ccacaccugggugcaggcca

SEQ ID NO: 1212 - RNA, 20 nt, Artificial Sequence
  LDLR targeting guide sequence portion
ccaccaaucucuaagccaaa

SEQ ID NO: 1213 - RNA, 20 nt, Artificial Sequence
  LDLR targeting guide sequence portion
ccaccacggauucagccaga

SEQ ID NO: 1214 - RNA, 20 nt, Artificial Sequence
  LDLR targeting guide sequence portion
ccacccagugucuuucgagg

SEQ ID NO: 1215 - RNA, 20 nt, Artificial Sequence
  LDLR targeting guide sequence portion
ccaccguacccagcugauuu

SEQ ID NO: 1216 - RNA, 20 nt, Artificial Sequence
  LDLR targeting guide sequence portion
ccaccgugacacaauccuca

SEQ ID NO: 1217 - RNA, 20 nt, Artificial Sequence
  LDLR targeting guide sequence portion
ccaccuagugcuuccacuuc

SEQ ID NO: 1218 - RNA, 20 nt, Artificial Sequence
  LDLR targeting guide sequence portion
ccaccucagccucgccaugc

SEQ ID NO: 1219 - RNA, 20 nt, Artificial Sequence
  LDLR targeting guide sequence portion
ccaccucgaaagacacuggg

SEQ ID NO: 1220 - RNA, 20 nt, Artificial Sequence
  LDLR targeting guide sequence portion
ccacggauucagccagauca

SEQ ID NO: 1221 - RNA, 20 nt, Artificial Sequence
  LDLR targeting guide sequence portion
ccacgggaauggaagugggu

SEQ ID NO: 1222 - RNA, 20 nt, Artificial Sequence
  LDLR targeting guide sequence portion
ccacgucauccuccagacug

SEQ ID NO: 1223 - RNA, 20 nt, Artificial Sequence
  LDLR targeting guide sequence portion
ccacguguccucacggccaa

SEQ ID NO: 1224 - RNA, 20 nt, Artificial Sequence
  LDLR targeting guide sequence portion
ccacuaucuguacagggacg

SEQ ID NO: 1225 - RNA, 20 nt, Artificial Sequence
  LDLR targeting guide sequence portion
ccacucauacauacaacggg

SEQ ID NO: 1226 - RNA, 20 nt, Artificial Sequence
  LDLR targeting guide sequence portion
ccacugcgcccggccucacc

SEQ ID NO: 1227 - RNA, 20 nt, Artificial Sequence
  LDLR targeting guide sequence portion
ccacuguauagaagguuuuu

SEQ ID NO: 1228 - RNA, 20 nt, Artificial Sequence
  LDLR targeting guide sequence portion
ccacuuccauucccgugguc

SEQ ID NO: 1229 - RNA, 20 nt, Artificial Sequence
  LDLR targeting guide sequence portion
ccacuucuaugcaaaugccu

SEQ ID NO: 1230 - RNA, 20 nt, Artificial Sequence
  LDLR targeting guide sequence portion
ccacuugcuucucugggccu

SEQ ID NO: 1231 - RNA, 20 nt, Artificial Sequence
  LDLR targeting guide sequence portion
ccagaaaggcuuaucacggu

SEQ ID NO: 1232 - RNA, 20 nt, Artificial Sequence
  LDLR targeting guide sequence portion
ccagaacccuuccugagacc

SEQ ID NO: 1233 - RNA, 20 nt, Artificial Sequence
  LDLR targeting guide sequence portion
ccagaagccacucauacaua

SEQ ID NO: 1234 - RNA, 20 nt, Artificial Sequence
  LDLR targeting guide sequence portion
ccagacacaggugccucacg

SEQ ID NO: 1235 - RNA, 20 nt, Artificial Sequence
  LDLR targeting guide sequence portion
ccagacuggaggauuuauuu

SEQ ID NO: 1236 - RNA, 20 nt, Artificial Sequence
  LDLR targeting guide sequence portion
ccagagaagcaaguggcuuu

SEQ ID NO: 1237 - RNA, 20 nt, Artificial Sequence
  LDLR targeting guide sequence portion
ccagaggcagagccugaguc

SEQ ID NO: 1238 - RNA, 20 nt, Artificial Sequence
  LDLR targeting guide sequence portion
ccagaggccaugggcugcug

SEQ ID NO: 1239 - RNA, 20 nt, Artificial Sequence
  LDLR targeting guide sequence portion
ccagaucauuuccgacgcca

SEQ ID NO: 1240 - RNA, 20 nt, Artificial Sequence
  LDLR targeting guide sequence portion
ccagccuggugcccauccuc

SEQ ID NO: 1241 - RNA, 20 nt, Artificial Sequence
  LDLR targeting guide sequence portion
ccagcugauuuuuaacuuuu

SEQ ID NO: 1242 - RNA, 20 nt, Artificial Sequence
  LDLR targeting guide sequence portion
ccaggaaagggauucauggc

SEQ ID NO: 1243 - RNA, 20 nt, Artificial Sequence
  LDLR targeting guide sequence portion
ccaggaaguuuugaguuucu

SEQ ID NO: 1244 - RNA, 20 nt, Artificial Sequence
  LDLR targeting guide sequence portion
ccaggaugacaccuccauuu

SEQ ID NO: 1245 - RNA, 20 nt, Artificial Sequence
  LDLR targeting guide sequence portion
ccaggcagauguucacgcca

SEQ ID NO: 1246 - RNA, 20 nt, Artificial Sequence
  LDLR targeting guide sequence portion
ccaggcauggcgaggcugag

SEQ ID NO: 1247 - RNA, 20 nt, Artificial Sequence
  LDLR targeting guide sequence portion
ccaggccagggaaagcccgu

SEQ ID NO: 1248 - RNA, 20 nt, Artificial Sequence
  LDLR targeting guide sequence portion
ccaggccugagcaacaaagc

SEQ ID NO: 1249 - RNA, 20 nt, Artificial Sequence
  LDLR targeting guide sequence portion
ccaggcuggaaagcaguggc

SEQ ID NO: 1250 - RNA, 20 nt, Artificial Sequence
  LDLR targeting guide sequence portion
ccaggcugguguccugacag

SEQ ID NO: 1251 - RNA, 20 nt, Artificial Sequence
  LDLR targeting guide sequence portion
ccagggacaaaacacugugu

SEQ ID NO: 1252 - RNA, 20 nt, Artificial Sequence
  LDLR targeting guide sequence portion
ccagggggucccguuggugc

SEQ ID NO: 1253 - RNA, 20 nt, Artificial Sequence
  LDLR targeting guide sequence portion
ccaggguuugcaaaaauaaa

SEQ ID NO: 1254 - RNA, 20 nt, Artificial Sequence
  LDLR targeting guide sequence portion
ccagguguggcugucaggac

SEQ ID NO: 1255 - RNA, 20 nt, Artificial Sequence
  LDLR targeting guide sequence portion
ccagguuagccuuugcccug

SEQ ID NO: 1256 - RNA, 20 nt, Artificial Sequence
  LDLR targeting guide sequence portion
ccagucuggaucguuugacg

SEQ ID NO: 1257 - RNA, 20 nt, Artificial Sequence
  LDLR targeting guide sequence portion
ccagugacucaggcucugcc

SEQ ID NO: 1258 - RNA, 20 nt, Artificial Sequence
  LDLR targeting guide sequence portion
ccagugcagggaaccgugau

SEQ ID NO: 1259 - RNA, 20 nt, Artificial Sequence
  LDLR targeting guide sequence portion
ccagugucuuucgagguggg

SEQ ID NO: 1260 - RNA, 20 nt, Artificial Sequence
  LDLR targeting guide sequence portion
ccaguucgugcaaauaaucu

SEQ ID NO: 1261 - RNA, 20 nt, Artificial Sequence
  LDLR targeting guide sequence portion
ccaucaacgacaagauuggg

SEQ ID NO: 1262 - RNA, 20 nt, Artificial Sequence
  LDLR targeting guide sequence portion
ccaucccaacacacacgaca

SEQ ID NO: 1263 - RNA, 20 nt, Artificial Sequence
  LDLR targeting guide sequence portion
ccauccucccaccucagccu

SEQ ID NO: 1264 - RNA, 20 nt, Artificial Sequence
  LDLR targeting guide sequence portion
ccauccucccgaccccuacc

SEQ ID NO: 1265 - RNA, 20 nt, Artificial Sequence
  LDLR targeting guide sequence portion
ccaucucccagaagccacuc

SEQ ID NO: 1266 - RNA, 20 nt, Artificial Sequence
  LDLR targeting guide sequence portion
ccaucucuacaaaaaccaaa

SEQ ID NO: 1267 - RNA, 20 nt, Artificial Sequence
  LDLR targeting guide sequence portion
ccaucucuuaaaaaaugaau

SEQ ID NO: 1268 - RNA, 20 nt, Artificial Sequence
  LDLR targeting guide sequence portion
ccaucugcuguuguguguug

SEQ ID NO: 1269 - RNA, 20 nt, Artificial Sequence
  LDLR targeting guide sequence portion
ccaugaaucccuuuccuggc

SEQ ID NO: 1270 - RNA, 20 nt, Artificial Sequence
  LDLR targeting guide sequence portion
ccaugcaauggcuuggguug

SEQ ID NO: 1271 - RNA, 20 nt, Artificial Sequence
  LDLR targeting guide sequence portion
ccaugcauggugcaucagca

SEQ ID NO: 1272 - RNA, 20 nt, Artificial Sequence
  LDLR targeting guide sequence portion
ccaugccuggccagaggcca

SEQ ID NO: 1273 - RNA, 20 nt, Artificial Sequence
  LDLR targeting guide sequence portion
ccauggccucuggccaggca

SEQ ID NO: 1274 - RNA, 20 nt, Artificial Sequence
  LDLR targeting guide sequence portion
ccaugggcugcugaugcacc

SEQ ID NO: 1275 - RNA, 20 nt, Artificial Sequence
  LDLR targeting guide sequence portion
ccauguuugaggauuguguc

SEQ ID NO: 1276 - RNA, 20 nt, Artificial Sequence
  LDLR targeting guide sequence portion
ccauucacuuccccaaucuu

SEQ ID NO: 1277 - RNA, 20 nt, Artificial Sequence
  LDLR targeting guide sequence portion
ccauucccguggucuccuug

SEQ ID NO: 1278 - RNA, 20 nt, Artificial Sequence
  LDLR targeting guide sequence portion
ccauugcaugggcacugucc

SEQ ID NO: 1279 - RNA, 20 nt, Artificial Sequence
  LDLR targeting guide sequence portion
ccauugucgucuuuaugucc

SEQ ID NO: 1280 - RNA, 20 nt, Artificial Sequence
  LDLR targeting guide sequence portion
ccauuucucuccaggaaguu

SEQ ID NO: 1281 - RNA, 20 nt, Artificial Sequence
  LDLR targeting guide sequence portion
cccaaaaagcguugcacaca

SEQ ID NO: 1282 - RNA, 20 nt, Artificial Sequence
  LDLR targeting guide sequence portion
cccaacacacacgacagaaa

SEQ ID NO: 1283 - RNA, 20 nt, Artificial Sequence
  LDLR targeting guide sequence portion
cccaagccauugcaugggca

SEQ ID NO: 1284 - RNA, 20 nt, Artificial Sequence
  LDLR targeting guide sequence portion
cccaaucuugucguugaugg

SEQ ID NO: 1285 - RNA, 20 nt, Artificial Sequence
  LDLR targeting guide sequence portion
cccacccagugucuuucgag

SEQ ID NO: 1286 - RNA, 20 nt, Artificial Sequence
  LDLR targeting guide sequence portion
cccaccuagugcuuccacuu

SEQ ID NO: 1287 - RNA, 20 nt, Artificial Sequence
  LDLR targeting guide sequence portion
cccaccucagccucgccaug

SEQ ID NO: 1288 - RNA, 20 nt, Artificial Sequence
  LDLR targeting guide sequence portion
cccaccucgaaagacacugg

SEQ ID NO: 1289 - RNA, 20 nt, Artificial Sequence
  LDLR targeting guide sequence portion
cccacuaucuguacagggac

SEQ ID NO: 1290 - RNA, 20 nt, Artificial Sequence
  LDLR targeting guide sequence portion
cccacuuccauucccguggu

SEQ ID NO: 1291 - RNA, 20 nt, Artificial Sequence
  LDLR targeting guide sequence portion
cccagaacccuuccugagac

SEQ ID NO: 1292 - RNA, 20 nt, Artificial Sequence
  LDLR targeting guide sequence portion
cccagaagccacucauacau

SEQ ID NO: 1293 - RNA, 20 nt, Artificial Sequence
  LDLR targeting guide sequence portion
cccagagaagcaaguggcuu

SEQ ID NO: 1294 - RNA, 20 nt, Artificial Sequence
  LDLR targeting guide sequence portion
cccagcugauuuuuaacuuu

SEQ ID NO: 1295 - RNA, 20 nt, Artificial Sequence
  LDLR targeting guide sequence portion
cccaggccagggaaagcccg

SEQ ID NO: 1296 - RNA, 20 nt, Artificial Sequence
  LDLR targeting guide sequence portion
cccaggcuggaaagcagugg

SEQ ID NO: 1297 - RNA, 20 nt, Artificial Sequence
  LDLR targeting guide sequence portion
cccagggacaaaacacugug

SEQ ID NO: 1298 - RNA, 20 nt, Artificial Sequence
  LDLR targeting guide sequence portion
cccagguguggcugucagga

SEQ ID NO: 1299 - RNA, 20 nt, Artificial Sequence
  LDLR targeting guide sequence portion
cccagugcagggaaccguga

SEQ ID NO: 1300 - RNA, 20 nt, Artificial Sequence
  LDLR targeting guide sequence portion
cccagugucuuucgaggugg

SEQ ID NO: 1301 - RNA, 20 nt, Artificial Sequence
  LDLR targeting guide sequence portion
cccaucaacgacaagauugg

SEQ ID NO: 1302 - RNA, 20 nt, Artificial Sequence
  LDLR targeting guide sequence portion
cccaucccaacacacacgac

SEQ ID NO: 1303 - RNA, 20 nt, Artificial Sequence
  LDLR targeting guide sequence portion
cccauccucccgaccccuac

SEQ ID NO: 1304 - RNA, 20 nt, Artificial Sequence
  LDLR targeting guide sequence portion
cccaucucccagaagccacu

SEQ ID NO: 1305 - RNA, 20 nt, Artificial Sequence
  LDLR targeting guide sequence portion
cccaucucuacaaaaaccaa

SEQ ID NO: 1306 - RNA, 20 nt, Artificial Sequence
  LDLR targeting guide sequence portion
cccaucucuuaaaaaaugaa

SEQ ID NO: 1307 - RNA, 20 nt, Artificial Sequence
  LDLR targeting guide sequence portion
cccaugcaauggcuuggguu

SEQ ID NO: 1308 - RNA, 20 nt, Artificial Sequence
  LDLR targeting guide sequence portion
cccauggccucuggccaggc

SEQ ID NO: 1309 - RNA, 20 nt, Artificial Sequence
  LDLR targeting guide sequence portion
ccccaaucuugucguugaug

SEQ ID NO: 1310 - RNA, 20 nt, Artificial Sequence
  LDLR targeting guide sequence portion
ccccacuaucuguacaggga

SEQ ID NO: 1311 - RNA, 20 nt, Artificial Sequence
  LDLR targeting guide sequence portion
ccccagugcagggaaccgug

SEQ ID NO: 1312 - RNA, 20 nt, Artificial Sequence
  LDLR targeting guide sequence portion
ccccaucucuuaaaaaauga

SEQ ID NO: 1313 - RNA, 20 nt, Artificial Sequence
  LDLR targeting guide sequence portion
cccccagugcagggaaccgu

SEQ ID NO: 1314 - RNA, 20 nt, Artificial Sequence
  LDLR targeting guide sequence portion
ccccccgggccuguuucucu

SEQ ID NO: 1315 - RNA, 20 nt, Artificial Sequence
  LDLR targeting guide sequence portion
cccccgaaucaugacccacc

SEQ ID NO: 1316 - RNA, 20 nt, Artificial Sequence
  LDLR targeting guide sequence portion
cccccgggccuguuucucuu

SEQ ID NO: 1317 - RNA, 20 nt, Artificial Sequence
  LDLR targeting guide sequence portion
cccccuacacagggccccga

SEQ ID NO: 1318 - RNA, 20 nt, Artificial Sequence
  LDLR targeting guide sequence portion
cccccuggcccugccucauc

SEQ ID NO: 1319 - RNA, 20 nt, Artificial Sequence
  LDLR targeting guide sequence portion
ccccgaaucaugacccaccc

SEQ ID NO: 1320 - RNA, 20 nt, Artificial Sequence
  LDLR targeting guide sequence portion
ccccgagaauagucacugaa

SEQ ID NO: 1321 - RNA, 20 nt, Artificial Sequence
  LDLR targeting guide sequence portion
ccccggcauucauugacacg

SEQ ID NO: 1322 - RNA, 20 nt, Artificial Sequence
  LDLR targeting guide sequence portion
ccccgggccuguuucucuua

SEQ ID NO: 1323 - RNA, 20 nt, Artificial Sequence
  LDLR targeting guide sequence portion
ccccguuguauguaugagug

SEQ ID NO: 1324 - RNA, 20 nt, Artificial Sequence
  LDLR targeting guide sequence portion
ccccuaaacucaggagucaa

SEQ ID NO: 1325 - RNA, 20 nt, Artificial Sequence
  LDLR targeting guide sequence portion
ccccuacacagggccccgag

SEQ ID NO: 1326 - RNA, 20 nt, Artificial Sequence
  LDLR targeting guide sequence portion
ccccuacccacuuccauucc

SEQ ID NO: 1327 - RNA, 20 nt, Artificial Sequence
  LDLR targeting guide sequence portion
ccccuccccuuucaucuucc

SEQ ID NO: 1328 - RNA, 20 nt, Artificial Sequence
  LDLR targeting guide sequence portion
ccccucucuguccccggcau

SEQ ID NO: 1329 - RNA, 20 nt, Artificial Sequence
  LDLR targeting guide sequence portion
ccccuggcccugccucaucc

SEQ ID NO: 1330 - RNA, 20 nt, Artificial Sequence
  LDLR targeting guide sequence portion
ccccuuucaucuuccauguu

SEQ ID NO: 1331 - RNA, 20 nt, Artificial Sequence
  LDLR targeting guide sequence portion
cccgaaucaugacccaccca

SEQ ID NO: 1332 - RNA, 20 nt, Artificial Sequence
  LDLR targeting guide sequence portion
cccgaccccuacccacuucc

SEQ ID NO: 1333 - RNA, 20 nt, Artificial Sequence
  LDLR targeting guide sequence portion
cccgagaauagucacugaac

SEQ ID NO: 1334 - RNA, 20 nt, Artificial Sequence
  LDLR targeting guide sequence portion
cccgcgugaagaugucacaa

SEQ ID NO: 1335 - RNA, 20 nt, Artificial Sequence
  LDLR targeting guide sequence portion
cccggcauucauugacacgg

SEQ ID NO: 1336 - RNA, 20 nt, Artificial Sequence
  LDLR targeting guide sequence portion
cccggccucaccgugcaugu

SEQ ID NO: 1337 - RNA, 20 nt, Artificial Sequence
  LDLR targeting guide sequence portion
cccgggccuguuucucuuau

SEQ ID NO: 1338 - RNA, 20 nt, Artificial Sequence
  LDLR targeting guide sequence portion
cccggggggaccaggaugac

SEQ ID NO: 1339 - RNA, 20 nt, Artificial Sequence
  LDLR targeting guide sequence portion
cccggucaaccugccccucu

SEQ ID NO: 1340 - RNA, 20 nt, Artificial Sequence
  LDLR targeting guide sequence portion
cccgguuaccuuggccguga

SEQ ID NO: 1341 - RNA, 20 nt, Artificial Sequence
  LDLR targeting guide sequence portion
cccgucaaacgauccagacu

SEQ ID NO: 1342 - RNA, 20 nt, Artificial Sequence
  LDLR targeting guide sequence portion
cccgucccugcccagaaccc

SEQ ID NO: 1343 - RNA, 20 nt, Artificial Sequence
  LDLR targeting guide sequence portion
cccguggucuccuugcacuu

SEQ ID NO: 1344 - RNA, 20 nt, Artificial Sequence
  LDLR targeting guide sequence portion
cccgugucaaugaaugccgg

SEQ ID NO: 1345 - RNA, 20 nt, Artificial Sequence
  LDLR targeting guide sequence portion
cccguuggugccaucugcug

SEQ ID NO: 1346 - RNA, 20 nt, Artificial Sequence
  LDLR targeting guide sequence portion
cccguuguauguaugagugg

SEQ ID NO: 1347 - RNA, 20 nt, Artificial Sequence
  LDLR targeting guide sequence portion
cccuaaacucaggagucaac

SEQ ID NO: 1348 - RNA, 20 nt, Artificial Sequence
  LDLR targeting guide sequence portion
cccuacacagggccccgaga

SEQ ID NO: 1349 - RNA, 20 nt, Artificial Sequence
  LDLR targeting guide sequence portion
cccuacccacuuccauuccc

SEQ ID NO: 1350 - RNA, 20 nt, Artificial Sequence
  LDLR targeting guide sequence portion
cccuccccuuucaucuucca

SEQ ID NO: 1351 - RNA, 20 nt, Artificial Sequence
  LDLR targeting guide sequence portion
cccucucuguccccggcauu

SEQ ID NO: 1352 - RNA, 20 nt, Artificial Sequence
  LDLR targeting guide sequence portion
cccugcccagaacccuuccu

SEQ ID NO: 1353 - RNA, 20 nt, Artificial Sequence
  LDLR targeting guide sequence portion
cccugccucauccaccaauc

SEQ ID NO: 1354 - RNA, 20 nt, Artificial Sequence
  LDLR targeting guide sequence portion
cccuggcccugccucaucca

SEQ ID NO: 1355 - RNA, 20 nt, Artificial Sequence
  LDLR targeting guide sequence portion
cccuggccugggaucccauc

SEQ ID NO: 1356 - RNA, 20 nt, Artificial Sequence
  LDLR targeting guide sequence portion
cccuggggacaauugccaau

SEQ ID NO: 1357 - RNA, 20 nt, Artificial Sequence
  LDLR targeting guide sequence portion
cccugguugcuguauuuguu

SEQ ID NO: 1358 - RNA, 20 nt, Artificial Sequence
  LDLR targeting guide sequence portion
cccuguacagauagugggga

SEQ ID NO: 1359 - RNA, 20 nt, Artificial Sequence
  LDLR targeting guide sequence portion
cccugucacccccgaaucau

SEQ ID NO: 1360 - RNA, 20 nt, Artificial Sequence
  LDLR targeting guide sequence portion
cccuguguaggggguuauug

SEQ ID NO: 1361 - RNA, 20 nt, Artificial Sequence
  LDLR targeting guide sequence portion
cccuuaauauuuauuaagug

SEQ ID NO: 1362 - RNA, 20 nt, Artificial Sequence
  LDLR targeting guide sequence portion
cccuuccugagaccucgccg

SEQ ID NO: 1363 - RNA, 20 nt, Artificial Sequence
  LDLR targeting guide sequence portion
cccuugugacaucuucacgc

SEQ ID NO: 1364 - RNA, 20 nt, Artificial Sequence
  LDLR targeting guide sequence portion
cccuuucaucuuccauguuu

SEQ ID NO: 1365 - RNA, 20 nt, Artificial Sequence
  LDLR targeting guide sequence portion
cccuuuccuggcuuaaggaa

SEQ ID NO: 1366 - RNA, 20 nt, Artificial Sequence
  LDLR targeting guide sequence portion
ccgaaaccagaaaggcuuau

SEQ ID NO: 1367 - RNA, 20 nt, Artificial Sequence
  LDLR targeting guide sequence portion
ccgaagccuguucugccucc

SEQ ID NO: 1368 - RNA, 20 nt, Artificial Sequence
  LDLR targeting guide sequence portion
ccgaaucaugacccacccag

SEQ ID NO: 1369 - RNA, 20 nt, Artificial Sequence
  LDLR targeting guide sequence portion
ccgaccccuacccacuucca

SEQ ID NO: 1370 - RNA, 20 nt, Artificial Sequence
  LDLR targeting guide sequence portion
ccgacgccaugaaucccuuu

SEQ ID NO: 1371 - RNA, 20 nt, Artificial Sequence
  LDLR targeting guide sequence portion
ccgagaauagucacugaaca

SEQ ID NO: 1372 - RNA, 20 nt, Artificial Sequence
  LDLR targeting guide sequence portion
ccgcccaccuagugcuucca

SEQ ID NO: 1373 - RNA, 20 nt, Artificial Sequence
  LDLR targeting guide sequence portion
ccgcgugaagaugucacaag

SEQ ID NO: 1374 - RNA, 20 nt, Artificial Sequence
  LDLR targeting guide sequence portion
ccggacaucagugcaacagu

SEQ ID NO: 1375 - RNA, 20 nt, Artificial Sequence
  LDLR targeting guide sequence portion
ccggagagacagugacagcc

SEQ ID NO: 1376 - RNA, 20 nt, Artificial Sequence
  LDLR targeting guide sequence portion
ccggcauucauugacacggg

SEQ ID NO: 1377 - RNA, 20 nt, Artificial Sequence
  LDLR targeting guide sequence portion
ccggccucaccgugcauguu

SEQ ID NO: 1378 - RNA, 20 nt, Artificial Sequence
  LDLR targeting guide sequence portion
ccggccuuguuuuauucaaa

SEQ ID NO: 1379 - RNA, 20 nt, Artificial Sequence
  LDLR targeting guide sequence portion
ccggcgaggucucaggaagg

SEQ ID NO: 1380 - RNA, 20 nt, Artificial Sequence
  LDLR targeting guide sequence portion
ccgggacuucaaagccguga

SEQ ID NO: 1381 - RNA, 20 nt, Artificial Sequence
  LDLR targeting guide sequence portion
ccgggccuguuucucuuauc

SEQ ID NO: 1382 - RNA, 20 nt, Artificial Sequence
  LDLR targeting guide sequence portion
ccggggacagagaggggcag

SEQ ID NO: 1383 - RNA, 20 nt, Artificial Sequence
  LDLR targeting guide sequence portion
ccggggggaccaggaugaca

SEQ ID NO: 1384 - RNA, 20 nt, Artificial Sequence
  LDLR targeting guide sequence portion
ccgggugucucaggcacuua

SEQ ID NO: 1385 - RNA, 20 nt, Artificial Sequence
  LDLR targeting guide sequence portion
ccggucaaccugccccucuc

SEQ ID NO: 1386 - RNA, 20 nt, Artificial Sequence
  LDLR targeting guide sequence portion
ccgguuaccuuggccgugag

SEQ ID NO: 1387 - RNA, 20 nt, Artificial Sequence
  LDLR targeting guide sequence portion
ccguacccagcugauuuuua

SEQ ID NO: 1388 - RNA, 20 nt, Artificial Sequence
  LDLR targeting guide sequence portion
ccgucaaacgauccagacug

SEQ ID NO: 1389 - RNA, 20 nt, Artificial Sequence
  LDLR targeting guide sequence portion
ccgucagacucccgcgugaa

SEQ ID NO: 1390 - RNA, 20 nt, Artificial Sequence
  LDLR targeting guide sequence portion
ccgucccugcccagaacccu

SEQ ID NO: 1391 - RNA, 20 nt, Artificial Sequence
  LDLR targeting guide sequence portion
ccgugacacaauccucaaac

SEQ ID NO: 1392 - RNA, 20 nt, Artificial Sequence
  LDLR targeting guide sequence portion
ccgugauaagccuuucuggu

SEQ ID NO: 1393 - RNA, 20 nt, Artificial Sequence
  LDLR targeting guide sequence portion
ccgugaucgugaauaucgag

SEQ ID NO: 1394 - RNA, 20 nt, Artificial Sequence
  LDLR targeting guide sequence portion
ccgugcauguuuuaaacaca

SEQ ID NO: 1395 - RNA, 20 nt, Artificial Sequence
  LDLR targeting guide sequence portion
ccgugguggcaccgagacca

SEQ ID NO: 1396 - RNA, 20 nt, Artificial Sequence
  LDLR targeting guide sequence portion
ccgugucaaugaaugccggg

SEQ ID NO: 1397 - RNA, 20 nt, Artificial Sequence
  LDLR targeting guide sequence portion
ccguuggugccaucugcugu

SEQ ID NO: 1398 - RNA, 20 nt, Artificial Sequence
  LDLR targeting guide sequence portion
ccguuguauguaugaguggc

SEQ ID NO: 1399 - RNA, 20 nt, Artificial Sequence
  LDLR targeting guide sequence portion
ccuaaacucaggagucaacg

SEQ ID NO: 1400 - RNA, 20 nt, Artificial Sequence
  LDLR targeting guide sequence portion
ccuacacagggccccgagaa

SEQ ID NO: 1401 - RNA, 20 nt, Artificial Sequence
  LDLR targeting guide sequence portion
ccuacccacuuccauucccg

SEQ ID NO: 1402 - RNA, 20 nt, Artificial Sequence
  LDLR targeting guide sequence portion
ccuagugcuuccacuucuau

SEQ ID NO: 1403 - RNA, 20 nt, Artificial Sequence
  LDLR targeting guide sequence portion
ccucaaacauggaagaugaa

SEQ ID NO: 1404 - RNA, 20 nt, Artificial Sequence
  LDLR targeting guide sequence portion
ccucaaaugccugagcucaa

SEQ ID NO: 1405 - RNA, 20 nt, Artificial Sequence
  LDLR targeting guide sequence portion
ccucaccgugcauguuuuaa

SEQ ID NO: 1406 - RNA, 20 nt, Artificial Sequence
  LDLR targeting guide sequence portion
ccucacggccaagguaaccg

SEQ ID NO: 1407 - RNA, 20 nt, Artificial Sequence
  LDLR targeting guide sequence portion
ccucagccucgccaugccug

SEQ ID NO: 1408 - RNA, 20 nt, Artificial Sequence
  LDLR targeting guide sequence portion
ccucauccaccaaucucuaa

SEQ ID NO: 1409 - RNA, 20 nt, Artificial Sequence
  LDLR targeting guide sequence portion
ccuccaagccauucacuucc

SEQ ID NO: 1410 - RNA, 20 nt, Artificial Sequence
  LDLR targeting guide sequence portion
ccuccagucuggaucguuug

SEQ ID NO: 1411 - RNA, 20 nt, Artificial Sequence
  LDLR targeting guide sequence portion
ccuccauuucucuccaggaa

SEQ ID NO: 1412 - RNA, 20 nt, Artificial Sequence
  LDLR targeting guide sequence portion
ccucccaccucagccucgcc

SEQ ID NO: 1413 - RNA, 20 nt, Artificial Sequence
  LDLR targeting guide sequence portion
ccuccccuuucaucuuccau

SEQ ID NO: 1414 - RNA, 20 nt, Artificial Sequence
  LDLR targeting guide sequence portion
ccuccgucagacucccgcgu

SEQ ID NO: 1415 - RNA, 20 nt, Artificial Sequence
  LDLR targeting guide sequence portion
ccucgaaagacacugggugg

SEQ ID NO: 1416 - RNA, 20 nt, Artificial Sequence
  LDLR targeting guide sequence portion
ccucgccaugccuggccaga

SEQ ID NO: 1417 - RNA, 20 nt, Artificial Sequence
  LDLR targeting guide sequence portion
ccucgccggccuuguuuuau

SEQ ID NO: 1418 - RNA, 20 nt, Artificial Sequence
  LDLR targeting guide sequence portion
ccucgugaaggauaagagaa

SEQ ID NO: 1419 - RNA, 20 nt, Artificial Sequence
  LDLR targeting guide sequence portion
ccucucuguccccggcauuc

SEQ ID NO: 1420 - RNA, 20 nt, Artificial Sequence
  LDLR targeting guide sequence portion
ccucugaaaugccucuucuu

SEQ ID NO: 1421 - RNA, 20 nt, Artificial Sequence
  LDLR targeting guide sequence portion
ccucuggccaggcauggcga

SEQ ID NO: 1422 - RNA, 20 nt, Artificial Sequence
  LDLR targeting guide sequence portion
ccucugggaaguggcaucau

SEQ ID NO: 1423 - RNA, 20 nt, Artificial Sequence
  LDLR targeting guide sequence portion
ccucuucuaugcaagccuug

SEQ ID NO: 1424 - RNA, 20 nt, Artificial Sequence
  LDLR targeting guide sequence portion
ccugaacucaagugauccag

SEQ ID NO: 1425 - RNA, 20 nt, Artificial Sequence
  LDLR targeting guide sequence portion
ccugaagucccgucaaacga

SEQ ID NO: 1426 - RNA, 20 nt, Artificial Sequence
  LDLR targeting guide sequence portion
ccugaaugucuuacugugau

SEQ ID NO: 1427 - RNA, 20 nt, Artificial Sequence
  LDLR targeting guide sequence portion
ccugacagccacaccugggu

SEQ ID NO: 1428 - RNA, 20 nt, Artificial Sequence
  LDLR targeting guide sequence portion
ccugacauccccuccccuuu

SEQ ID NO: 1429 - RNA, 20 nt, Artificial Sequence
  LDLR targeting guide sequence portion
ccugagacacccgguuaccu

SEQ ID NO: 1430 - RNA, 20 nt, Artificial Sequence
  LDLR targeting guide sequence portion
ccugagaccucgccggccuu

SEQ ID NO: 1431 - RNA, 20 nt, Artificial Sequence
  LDLR targeting guide sequence portion
ccugagcaacaaagcgagau

SEQ ID NO: 1432 - RNA, 20 nt, Artificial Sequence
  LDLR targeting guide sequence portion
ccugagucacuggucacccu

SEQ ID NO: 1433 - RNA, 20 nt, Artificial Sequence
  LDLR targeting guide sequence portion
ccugaguuuagggguuuggc

SEQ ID NO: 1434 - RNA, 20 nt, Artificial Sequence
  LDLR targeting guide sequence portion
ccugcacccagguguggcug

SEQ ID NO: 1435 - RNA, 20 nt, Artificial Sequence
  LDLR targeting guide sequence portion
ccugccagagcuuuguuuua

SEQ ID NO: 1436 - RNA, 20 nt, Artificial Sequence
  LDLR targeting guide sequence portion
ccugcccagaacccuuccug

SEQ ID NO: 1437 - RNA, 20 nt, Artificial Sequence
  LDLR targeting guide sequence portion
ccugccccucucuguccccg

SEQ ID NO: 1438 - RNA, 20 nt, Artificial Sequence
  LDLR targeting guide sequence portion
ccugccucauccaccaaucu

SEQ ID NO: 1439 - RNA, 20 nt, Artificial Sequence
  LDLR targeting guide sequence portion
ccuggagagaaauggaggug

SEQ ID NO: 1440 - RNA, 20 nt, Artificial Sequence
  LDLR targeting guide sequence portion
ccuggagucccgucccugcc

SEQ ID NO: 1441 - RNA, 20 nt, Artificial Sequence
  LDLR targeting guide sequence portion
ccuggccagaggccaugggc

SEQ ID NO: 1442 - RNA, 20 nt, Artificial Sequence
  LDLR targeting guide sequence portion
ccuggcccugccucauccac

SEQ ID NO: 1443 - RNA, 20 nt, Artificial Sequence
  LDLR targeting guide sequence portion
ccuggccugggaucccaucc

SEQ ID NO: 1444 - RNA, 20 nt, Artificial Sequence
  LDLR targeting guide sequence portion
ccuggcugucuagcaaggcu

SEQ ID NO: 1445 - RNA, 20 nt, Artificial Sequence
  LDLR targeting guide sequence portion
ccuggcuuaaggaagguaca

SEQ ID NO: 1446 - RNA, 20 nt, Artificial Sequence
  LDLR targeting guide sequence portion
ccugggaucccaucccaaca

SEQ ID NO: 1447 - RNA, 20 nt, Artificial Sequence
  LDLR targeting guide sequence portion
ccuggggacaauugccaauc

SEQ ID NO: 1448 - RNA, 20 nt, Artificial Sequence
  LDLR targeting guide sequence portion
ccugggugcaggccacgugu

SEQ ID NO: 1449 - RNA, 20 nt, Artificial Sequence
  LDLR targeting guide sequence portion
ccugguccccccgggccugu

SEQ ID NO: 1450 - RNA, 20 nt, Artificial Sequence
  LDLR targeting guide sequence portion
ccugguugcuguauuuguuc

SEQ ID NO: 1451 - RNA, 20 nt, Artificial Sequence
  LDLR targeting guide sequence portion
ccuguacagauaguggggau

SEQ ID NO: 1452 - RNA, 20 nt, Artificial Sequence
  LDLR targeting guide sequence portion
ccugucacccccgaaucaug

SEQ ID NO: 1453 - RNA, 20 nt, Artificial Sequence
  LDLR targeting guide sequence portion
ccuguguaggggguuauugc

SEQ ID NO: 1454 - RNA, 20 nt, Artificial Sequence
  LDLR targeting guide sequence portion
ccugugucuggccaaauuca

SEQ ID NO: 1455 - RNA, 20 nt, Artificial Sequence
  LDLR targeting guide sequence portion
ccuguucugccucccagaug

SEQ ID NO: 1456 - RNA, 20 nt, Artificial Sequence
  LDLR targeting guide sequence portion
ccuguuucucuuauccuuca

SEQ ID NO: 1457 - RNA, 20 nt, Artificial Sequence
  LDLR targeting guide sequence portion
ccuuaagccaggaaagggau

SEQ ID NO: 1458 - RNA, 20 nt, Artificial Sequence
  LDLR targeting guide sequence portion
ccuucacgaggaaaggaaga

SEQ ID NO: 1459 - RNA, 20 nt, Artificial Sequence
  LDLR targeting guide sequence portion
ccuuccugagaccucgccgg

SEQ ID NO: 1460 - RNA, 20 nt, Artificial Sequence
  LDLR targeting guide sequence portion
ccuuccuuaagccaggaaag

SEQ ID NO: 1461 - RNA, 20 nt, Artificial Sequence
  LDLR targeting guide sequence portion
ccuucuauacagugguuuaa

SEQ ID NO: 1462 - RNA, 20 nt, Artificial Sequence
  LDLR targeting guide sequence portion
ccuugcuagacagccagguu

SEQ ID NO: 1463 - RNA, 20 nt, Artificial Sequence
  LDLR targeting guide sequence portion
ccuugugacaucuucacgcg

SEQ ID NO: 1464 - RNA, 20 nt, Artificial Sequence
  LDLR targeting guide sequence portion
ccuuguuuuauucaaagaca

SEQ ID NO: 1465 - RNA, 20 nt, Artificial Sequence
  LDLR targeting guide sequence portion
ccuuucaucuuccauguuug

SEQ ID NO: 1466 - RNA, 20 nt, Artificial Sequence
  LDLR targeting guide sequence portion
ccuuuccucgugaaggauaa

SEQ ID NO: 1467 - RNA, 20 nt, Artificial Sequence
  LDLR targeting guide sequence portion
ccuuuccuggcuuaaggaag

SEQ ID NO: 1468 - RNA, 20 nt, Artificial Sequence
  LDLR targeting guide sequence portion
ccuuucugguuucggagcac

SEQ ID NO: 1469 - RNA, 20 nt, Artificial Sequence
  LDLR targeting guide sequence portion
ccuuugcccugucacccccg

SEQ ID NO: 1470 - RNA, 20 nt, Artificial Sequence
  LDLR targeting guide sequence portion
cgaaaccagaaaggcuuauc

SEQ ID NO: 1471 - RNA, 20 nt, Artificial Sequence
  LDLR targeting guide sequence portion
cgaaagacacuggguggguc

SEQ ID NO: 1472 - RNA, 20 nt, Artificial Sequence
  LDLR targeting guide sequence portion
cgaacuggacugugugcaac

SEQ ID NO: 1473 - RNA, 20 nt, Artificial Sequence
  LDLR targeting guide sequence portion
cgaagccuguucugccuccc

SEQ ID NO: 1474 - RNA, 20 nt, Artificial Sequence
  LDLR targeting guide sequence portion
cgaaucaugacccacccagu

SEQ ID NO: 1475 - RNA, 20 nt, Artificial Sequence
  LDLR targeting guide sequence portion
cgacaagauuggggaaguga

SEQ ID NO: 1476 - RNA, 20 nt, Artificial Sequence
  LDLR targeting guide sequence portion
cgacaauggcaguucucgau

SEQ ID NO: 1477 - RNA, 20 nt, Artificial Sequence
  LDLR targeting guide sequence portion
cgacagaaaacagugcaaaa

SEQ ID NO: 1478 - RNA, 20 nt, Artificial Sequence
  LDLR targeting guide sequence portion
cgacagccucaaaugccuga

SEQ ID NO: 1479 - RNA, 20 nt, Artificial Sequence
  LDLR targeting guide sequence portion
cgaccccuacccacuuccau

SEQ ID NO: 1480 - RNA, 20 nt, Artificial Sequence
  LDLR targeting guide sequence portion
cgacgccaugaaucccuuuc

SEQ ID NO: 1481 - RNA, 20 nt, Artificial Sequence
  LDLR targeting guide sequence portion
cgagaacugccauugucguc

SEQ ID NO: 1482 - RNA, 20 nt, Artificial Sequence
  LDLR targeting guide sequence portion
cgagaauagucacugaacaa

SEQ ID NO: 1483 - RNA, 20 nt, Artificial Sequence
  LDLR targeting guide sequence portion
cgagaccaaacucauucacc

SEQ ID NO: 1484 - RNA, 20 nt, Artificial Sequence
  LDLR targeting guide sequence portion
cgagaucccaucucuacaaa

SEQ ID NO: 1485 - RNA, 20 nt, Artificial Sequence
  LDLR targeting guide sequence portion
cgaggaaaggaagaaaccaa

SEQ ID NO: 1486 - RNA, 20 nt, Artificial Sequence
  LDLR targeting guide sequence portion
cgagguggguuuguaccuuc

SEQ ID NO: 1487 - RNA, 20 nt, Artificial Sequence
  LDLR targeting guide sequence portion
cgauauucacgaucacggcu

SEQ ID NO: 1488 - RNA, 20 nt, Artificial Sequence
  LDLR targeting guide sequence portion
cgaucacggcuuugaagucc

SEQ ID NO: 1489 - RNA, 20 nt, Artificial Sequence
  LDLR targeting guide sequence portion
cgauccagacuggaggauuu

SEQ ID NO: 1490 - RNA, 20 nt, Artificial Sequence
  LDLR targeting guide sequence portion
cgauuucagaaagaaccuga

SEQ ID NO: 1491 - RNA, 20 nt, Artificial Sequence
  LDLR targeting guide sequence portion
cgcauuuacgugcuccgaaa

SEQ ID NO: 1492 - RNA, 20 nt, Artificial Sequence
  LDLR targeting guide sequence portion
cgccacgucauccuccagac

SEQ ID NO: 1493 - RNA, 20 nt, Artificial Sequence
  LDLR targeting guide sequence portion
cgccaugaaucccuuuccug

SEQ ID NO: 1494 - RNA, 20 nt, Artificial Sequence
  LDLR targeting guide sequence portion
cgccaugccuggccagaggc

SEQ ID NO: 1495 - RNA, 20 nt, Artificial Sequence
  LDLR targeting guide sequence portion
cgcccaccuagugcuuccac

SEQ ID NO: 1496 - RNA, 20 nt, Artificial Sequence
  LDLR targeting guide sequence portion
cgcccggccucaccgugcau

SEQ ID NO: 1497 - RNA, 20 nt, Artificial Sequence
  LDLR targeting guide sequence portion
cgccggccuuguuuuauuca

SEQ ID NO: 1498 - RNA, 20 nt, Artificial Sequence
  LDLR targeting guide sequence portion
cgccguguuacuguugcacu

SEQ ID NO: 1499 - RNA, 20 nt, Artificial Sequence
  LDLR targeting guide sequence portion
cgcgggagucugacggaggc

SEQ ID NO: 1500 - RNA, 20 nt, Artificial Sequence
  LDLR targeting guide sequence portion
cgcgugaagaugucacaagg

SEQ ID NO: 1501 - RNA, 20 nt, Artificial Sequence
  LDLR targeting guide sequence portion
cgcuuuguugcucaggccug

SEQ ID NO: 1502 - RNA, 20 nt, Artificial Sequence
  LDLR targeting guide sequence portion
cgcuuuuugggagaaugaug

SEQ ID NO: 1503 - RNA, 20 nt, Artificial Sequence
  LDLR targeting guide sequence portion
cggaaaugaucuggcugaau

SEQ ID NO: 1504 - RNA, 20 nt, Artificial Sequence
  LDLR targeting guide sequence portion
cggacagugcccaugcaaug

SEQ ID NO: 1505 - RNA, 20 nt, Artificial Sequence
  LDLR targeting guide sequence portion
cggacauaaagacgacaaug

SEQ ID NO: 1506 - RNA, 20 nt, Artificial Sequence
  LDLR targeting guide sequence portion
cggacaucagugcaacagua

SEQ ID NO: 1507 - RNA, 20 nt, Artificial Sequence
  LDLR targeting guide sequence portion
cggagagacagugacagccu

SEQ ID NO: 1508 - RNA, 20 nt, Artificial Sequence
  LDLR targeting guide sequence portion
cggagcacguaaaugcgucc

SEQ ID NO: 1509 - RNA, 20 nt, Artificial Sequence
  LDLR targeting guide sequence portion
cggaggcugucacugucucu

SEQ ID NO: 1510 - RNA, 20 nt, Artificial Sequence
  LDLR targeting guide sequence portion
cggauucagccagaucauuu

SEQ ID NO: 1511 - RNA, 20 nt, Artificial Sequence
  LDLR targeting guide sequence portion
cggcauucauugacacgggc

SEQ ID NO: 1512 - RNA, 20 nt, Artificial Sequence
  LDLR targeting guide sequence portion
cggccaagguaaccgggugu

SEQ ID NO: 1513 - RNA, 20 nt, Artificial Sequence
  LDLR targeting guide sequence portion
cggccucaccgugcauguuu

SEQ ID NO: 1514 - RNA, 20 nt, Artificial Sequence
  LDLR targeting guide sequence portion
cggccuuguuuuauucaaag

SEQ ID NO: 1515 - RNA, 20 nt, Artificial Sequence
  LDLR targeting guide sequence portion
cggcgauuucagaaagaacc

SEQ ID NO: 1516 - RNA, 20 nt, Artificial Sequence
  LDLR targeting guide sequence portion
cggcuuugaagucccgguca

SEQ ID NO: 1517 - RNA, 20 nt, Artificial Sequence
  LDLR targeting guide sequence portion
cgggaauggaaguggguagg

SEQ ID NO: 1518 - RNA, 20 nt, Artificial Sequence
  LDLR targeting guide sequence portion
cgggacccccuggcccugcc

SEQ ID NO: 1519 - RNA, 20 nt, Artificial Sequence
  LDLR targeting guide sequence portion
cgggacuccaggcagauguu

SEQ ID NO: 1520 - RNA, 20 nt, Artificial Sequence
  LDLR targeting guide sequence portion
cgggacuucaaagccgugau

SEQ ID NO: 1521 - RNA, 20 nt, Artificial Sequence
  LDLR targeting guide sequence portion
cgggacuucagguucuuucu

SEQ ID NO: 1522 - RNA, 20 nt, Artificial Sequence
  LDLR targeting guide sequence portion
cgggaggaugggcaccaggc

SEQ ID NO: 1523 - RNA, 20 nt, Artificial Sequence
  LDLR targeting guide sequence portion
cgggagucugacggaggcug

SEQ ID NO: 1524 - RNA, 20 nt, Artificial Sequence
  LDLR targeting guide sequence portion
cgggccuguuucucuuaucc

SEQ ID NO: 1525 - RNA, 20 nt, Artificial Sequence
  LDLR targeting guide sequence portion
cgggcuuucccuggccuggg

SEQ ID NO: 1526 - RNA, 20 nt, Artificial Sequence
  LDLR targeting guide sequence portion
cggggacagagaggggcagg

SEQ ID NO: 1527 - RNA, 20 nt, Artificial Sequence
  LDLR targeting guide sequence portion
cggggacaucauucucccaa

SEQ ID NO: 1528 - RNA, 20 nt, Artificial Sequence
  LDLR targeting guide sequence portion
cggggcccuguguagggggu

SEQ ID NO: 1529 - RNA, 20 nt, Artificial Sequence
  LDLR targeting guide sequence portion
cggggggaccaggaugacac

SEQ ID NO: 1530 - RNA, 20 nt, Artificial Sequence
  LDLR targeting guide sequence portion
cgggggugacagggcaaagg

SEQ ID NO: 1531 - RNA, 20 nt, Artificial Sequence
  LDLR targeting guide sequence portion
cgggugucucaggcacuuaa

SEQ ID NO: 1532 - RNA, 20 nt, Artificial Sequence
  LDLR targeting guide sequence portion
cggucaaccugccccucucu

SEQ ID NO: 1533 - RNA, 20 nt, Artificial Sequence
  LDLR targeting guide sequence portion
cggugaggccgggcgcagug

SEQ ID NO: 1534 - RNA, 20 nt, Artificial Sequence
  LDLR targeting guide sequence portion
cggugccaccacggauucag

SEQ ID NO: 1535 - RNA, 20 nt, Artificial Sequence
  LDLR targeting guide sequence portion
cgguggagagaaacucaaaa

SEQ ID NO: 1536 - RNA, 20 nt, Artificial Sequence
  LDLR targeting guide sequence portion
cguaaaugcgucccuguaca

SEQ ID NO: 1537 - RNA, 20 nt, Artificial Sequence
  LDLR targeting guide sequence portion
cguacccagcugauuuuuaa

SEQ ID NO: 1538 - RNA, 20 nt, Artificial Sequence
  LDLR targeting guide sequence portion
cgucaaacgauccagacugg

SEQ ID NO: 1539 - RNA, 20 nt, Artificial Sequence
  LDLR targeting guide sequence portion
cgucagacucccgcgugaag

SEQ ID NO: 1540 - RNA, 20 nt, Artificial Sequence
  LDLR targeting guide sequence portion
cgucauccuccagacugacc

SEQ ID NO: 1541 - RNA, 20 nt, Artificial Sequence
  LDLR targeting guide sequence portion
cgucccugcccagaacccuu

SEQ ID NO: 1542 - RNA, 20 nt, Artificial Sequence
  LDLR targeting guide sequence portion
cgucccuguacagauagugg

SEQ ID NO: 1543 - RNA, 20 nt, Artificial Sequence
  LDLR targeting guide sequence portion
cgucggaaaugaucuggcug

SEQ ID NO: 1544 - RNA, 20 nt, Artificial Sequence
  LDLR targeting guide sequence portion
cgucuuuauguccgcccacc

SEQ ID NO: 1545 - RNA, 20 nt, Artificial Sequence
  LDLR targeting guide sequence portion
cgugaacaucugccuggagu

SEQ ID NO: 1546 - RNA, 20 nt, Artificial Sequence
  LDLR targeting guide sequence portion
cgugaagaugucacaaggga

SEQ ID NO: 1547 - RNA, 20 nt, Artificial Sequence
  LDLR targeting guide sequence portion
cgugaaggauaagagaaaca

SEQ ID NO: 1548 - RNA, 20 nt, Artificial Sequence
  LDLR targeting guide sequence portion
cgugaauaucgagaacugcc

SEQ ID NO: 1549 - RNA, 20 nt, Artificial Sequence
  LDLR targeting guide sequence portion
cgugacacaauccucaaaca

SEQ ID NO: 1550 - RNA, 20 nt, Artificial Sequence
  LDLR targeting guide sequence portion
cgugagcuaugauuaugcca

SEQ ID NO: 1551 - RNA, 20 nt, Artificial Sequence
  LDLR targeting guide sequence portion
cgugaggacacguggccugc

SEQ ID NO: 1552 - RNA, 20 nt, Artificial Sequence
  LDLR targeting guide sequence portion
cgugaggcaccugugucugg

SEQ ID NO: 1553 - RNA, 20 nt, Artificial Sequence
  LDLR targeting guide sequence portion
cgugauaagccuuucugguu

SEQ ID NO: 1554 - RNA, 20 nt, Artificial Sequence
  LDLR targeting guide sequence portion
cgugaucgugaauaucgaga

SEQ ID NO: 1555 - RNA, 20 nt, Artificial Sequence
  LDLR targeting guide sequence portion
cgugcaaauaaucuuuguac

SEQ ID NO: 1556 - RNA, 20 nt, Artificial Sequence
  LDLR targeting guide sequence portion
cgugcauguuuuaaacacau

SEQ ID NO: 1557 - RNA, 20 nt, Artificial Sequence
  LDLR targeting guide sequence portion
cgugccaccguacccagcug

SEQ ID NO: 1558 - RNA, 20 nt, Artificial Sequence
  LDLR targeting guide sequence portion
cgugcuccgaaaccagaaag

SEQ ID NO: 1559 - RNA, 20 nt, Artificial Sequence
  LDLR targeting guide sequence portion
cguggccugcacccaggugu

SEQ ID NO: 1560 - RNA, 20 nt, Artificial Sequence
  LDLR targeting guide sequence portion
cguggcgugaacaucugccu

SEQ ID NO: 1561 - RNA, 20 nt, Artificial Sequence
  LDLR targeting guide sequence portion
cguggucuccuugcacuuuc

SEQ ID NO: 1562 - RNA, 20 nt, Artificial Sequence
  LDLR targeting guide sequence portion
cgugguggcaccgagaccaa

SEQ ID NO: 1563 - RNA, 20 nt, Artificial Sequence
  LDLR targeting guide sequence portion
cguguccucacggccaaggu

SEQ ID NO: 1564 - RNA, 20 nt, Artificial Sequence
  LDLR targeting guide sequence portion
cguguguguugggaugggau

SEQ ID NO: 1565 - RNA, 20 nt, Artificial Sequence
  LDLR targeting guide sequence portion
cguguuacuguugcacugau

SEQ ID NO: 1566 - RNA, 20 nt, Artificial Sequence
  LDLR targeting guide sequence portion
cguguuuaccucuucuaugc

SEQ ID NO: 1567 - RNA, 20 nt, Artificial Sequence
  LDLR targeting guide sequence portion
cguugacuccugaguuuagg

SEQ ID NO: 1568 - RNA, 20 nt, Artificial Sequence
  LDLR targeting guide sequence portion
cguugauggguauguguuua

SEQ ID NO: 1569 - RNA, 20 nt, Artificial Sequence
  LDLR targeting guide sequence portion
cguugcacacaguccaguuc

SEQ ID NO: 1570 - RNA, 20 nt, Artificial Sequence
  LDLR targeting guide sequence portion
cguuggugccaucugcuguu

SEQ ID NO: 1571 - RNA, 20 nt, Artificial Sequence
  LDLR targeting guide sequence portion
cguuguauguaugaguggcu

SEQ ID NO: 1572 - RNA, 20 nt, Artificial Sequence
  LDLR targeting guide sequence portion
cguuugacgggacuucaggu

SEQ ID NO: 1573 - RNA, 20 nt, Artificial Sequence
  LDLR targeting guide sequence portion
cuaaacucaggagucaacgu

SEQ ID NO: 1574 - RNA, 20 nt, Artificial Sequence
  LDLR targeting guide sequence portion
cuaaccuggcugucuagcaa

SEQ ID NO: 1575 - RNA, 20 nt, Artificial Sequence
  LDLR targeting guide sequence portion
cuaagccaaaccccuaaacu

SEQ ID NO: 1576 - RNA, 20 nt, Artificial Sequence
  LDLR targeting guide sequence portion
cuacaaaaaccuucuauaca

SEQ ID NO: 1577 - RNA, 20 nt, Artificial Sequence
  LDLR targeting guide sequence portion
cuacacagggccccgagaau

SEQ ID NO: 1578 - RNA, 20 nt, Artificial Sequence
  LDLR targeting guide sequence portion
cuacccacuuccauucccgu

SEQ ID NO: 1579 - RNA, 20 nt, Artificial Sequence
  LDLR targeting guide sequence portion
cuagacagccagguuagccu

SEQ ID NO: 1580 - RNA, 20 nt, Artificial Sequence
  LDLR targeting guide sequence portion
cuagcaaggcuugcauagaa

SEQ ID NO: 1581 - RNA, 20 nt, Artificial Sequence
  LDLR targeting guide sequence portion
cuaggugggcggacauaaag

SEQ ID NO: 1582 - RNA, 20 nt, Artificial Sequence
  LDLR targeting guide sequence portion
cuagugcuuccacuucuaug

SEQ ID NO: 1583 - RNA, 20 nt, Artificial Sequence
  LDLR targeting guide sequence portion
cuauacagugguuuaaaaag

SEQ ID NO: 1584 - RNA, 20 nt, Artificial Sequence
  LDLR targeting guide sequence portion
cuaucuguacagggacgcau

SEQ ID NO: 1585 - RNA, 20 nt, Artificial Sequence
  LDLR targeting guide sequence portion
cuaugauuaugccacugcuu

SEQ ID NO: 1586 - RNA, 20 nt, Artificial Sequence
  LDLR targeting guide sequence portion
cuaugcaaaugccuccaagc

SEQ ID NO: 1587 - RNA, 20 nt, Artificial Sequence
  LDLR targeting guide sequence portion
cuaugcaagccuugcuagac

SEQ ID NO: 1588 - RNA, 20 nt, Artificial Sequence
  LDLR targeting guide sequence portion
cuauucucggggcccugugu

SEQ ID NO: 1589 - RNA, 20 nt, Artificial Sequence
  LDLR targeting guide sequence portion
cuauuuauuuuugcaaaccc

SEQ ID NO: 1590 - RNA, 20 nt, Artificial Sequence
  LDLR targeting guide sequence portion
cucaaaacuuccuggagaga

SEQ ID NO: 1591 - RNA, 20 nt, Artificial Sequence
  LDLR targeting guide sequence portion
cucaaacauggaagaugaaa

SEQ ID NO: 1592 - RNA, 20 nt, Artificial Sequence
  LDLR targeting guide sequence portion
cucaaaugccugagcucaaa

SEQ ID NO: 1593 - RNA, 20 nt, Artificial Sequence
  LDLR targeting guide sequence portion
cucaagugauccagcucagc

SEQ ID NO: 1594 - RNA, 20 nt, Artificial Sequence
  LDLR targeting guide sequence portion
cucaccgugcauguuuuaaa

SEQ ID NO: 1595 - RNA, 20 nt, Artificial Sequence
  LDLR targeting guide sequence portion
cucacgacagccucaaaugc

SEQ ID NO: 1596 - RNA, 20 nt, Artificial Sequence
  LDLR targeting guide sequence portion
cucacggccaagguaaccgg

SEQ ID NO: 1597 - RNA, 20 nt, Artificial Sequence
  LDLR targeting guide sequence portion
cucagccucgccaugccugg

SEQ ID NO: 1598 - RNA, 20 nt, Artificial Sequence
  LDLR targeting guide sequence portion
cucaggaaggguucugggca

SEQ ID NO: 1599 - RNA, 20 nt, Artificial Sequence
  LDLR targeting guide sequence portion
cucaggagucaacguguuua

SEQ ID NO: 1600 - RNA, 20 nt, Artificial Sequence
  LDLR targeting guide sequence portion
cucaggcacuuaauaaauau

SEQ ID NO: 1601 - RNA, 20 nt, Artificial Sequence
  LDLR targeting guide sequence portion
cucaggcauuugaggcuguc

SEQ ID NO: 1602 - RNA, 20 nt, Artificial Sequence
  LDLR targeting guide sequence portion
cucaggccuggucuccaacu

SEQ ID NO: 1603 - RNA, 20 nt, Artificial Sequence
  LDLR targeting guide sequence portion
cucaggcucugccucuggga

SEQ ID NO: 1604 - RNA, 20 nt, Artificial Sequence
  LDLR targeting guide sequence portion
cucaguucagaguuguacac

SEQ ID NO: 1605 - RNA, 20 nt, Artificial Sequence
  LDLR targeting guide sequence portion
cucauacauacaacggggac

SEQ ID NO: 1606 - RNA, 20 nt, Artificial Sequence
  LDLR targeting guide sequence portion
cucauccaccaaucucuaag

SEQ ID NO: 1607 - RNA, 20 nt, Artificial Sequence
  LDLR targeting guide sequence portion
cuccaagccauucacuuccc

SEQ ID NO: 1608 - RNA, 20 nt, Artificial Sequence
  LDLR targeting guide sequence portion
cuccaccgugacacaauccu

SEQ ID NO: 1609 - RNA, 20 nt, Artificial Sequence
  LDLR targeting guide sequence portion
cuccaggaaguuuugaguuu

SEQ ID NO: 1610 - RNA, 20 nt, Artificial Sequence
  LDLR targeting guide sequence portion
cuccaggcagauguucacgc

SEQ ID NO: 1611 - RNA, 20 nt, Artificial Sequence
  LDLR targeting guide sequence portion
cuccagucuggaucguuuga

SEQ ID NO: 1612 - RNA, 20 nt, Artificial Sequence
  LDLR targeting guide sequence portion
cuccauuucucuccaggaag

SEQ ID NO: 1613 - RNA, 20 nt, Artificial Sequence
  LDLR targeting guide sequence portion
cucccaaaaagcguugcaca

SEQ ID NO: 1614 - RNA, 20 nt, Artificial Sequence
  LDLR targeting guide sequence portion
cucccaccucagccucgcca

SEQ ID NO: 1615 - RNA, 20 nt, Artificial Sequence
  LDLR targeting guide sequence portion
cucccagaagccacucauac

SEQ ID NO: 1616 - RNA, 20 nt, Artificial Sequence
  LDLR targeting guide sequence portion
cuccccuuucaucuuccaug

SEQ ID NO: 1617 - RNA, 20 nt, Artificial Sequence
  LDLR targeting guide sequence portion
cucccgaccccuacccacuu

SEQ ID NO: 1618 - RNA, 20 nt, Artificial Sequence
  LDLR targeting guide sequence portion
cucccgcgugaagaugucac

SEQ ID NO: 1619 - RNA, 20 nt, Artificial Sequence
  LDLR targeting guide sequence portion
cuccgaaaccagaaaggcuu

SEQ ID NO: 1620 - RNA, 20 nt, Artificial Sequence
  LDLR targeting guide sequence portion
cuccggacaucagugcaaca

SEQ ID NO: 1621 - RNA, 20 nt, Artificial Sequence
  LDLR targeting guide sequence portion
cuccgucagacucccgcgug

SEQ ID NO: 1622 - RNA, 20 nt, Artificial Sequence
  LDLR targeting guide sequence portion
cuccugaacucaagugaucc

SEQ ID NO: 1623 - RNA, 20 nt, Artificial Sequence
  LDLR targeting guide sequence portion
cuccugaguuuagggguuug

SEQ ID NO: 1624 - RNA, 20 nt, Artificial Sequence
  LDLR targeting guide sequence portion
cuccuugcacuuucucaguu

SEQ ID NO: 1625 - RNA, 20 nt, Artificial Sequence
  LDLR targeting guide sequence portion
cucgaaagacacuggguggg

SEQ ID NO: 1626 - RNA, 20 nt, Artificial Sequence
  LDLR targeting guide sequence portion
cucgauauucacgaucacgg

SEQ ID NO: 1627 - RNA, 20 nt, Artificial Sequence
  LDLR targeting guide sequence portion
cucgaucauggcucacugca

SEQ ID NO: 1628 - RNA, 20 nt, Artificial Sequence
  LDLR targeting guide sequence portion
cucgccaugccuggccagag

SEQ ID NO: 1629 - RNA, 20 nt, Artificial Sequence
  LDLR targeting guide sequence portion
cucgccggccuuguuuuauu

SEQ ID NO: 1630 - RNA, 20 nt, Artificial Sequence
  LDLR targeting guide sequence portion
cucgcuuuguugcucaggcc

SEQ ID NO: 1631 - RNA, 20 nt, Artificial Sequence
  LDLR targeting guide sequence portion
cucggggcccuguguagggg

SEQ ID NO: 1632 - RNA, 20 nt, Artificial Sequence
  LDLR targeting guide sequence portion
cucggugccaccacggauuc

SEQ ID NO: 1633 - RNA, 20 nt, Artificial Sequence
  LDLR targeting guide sequence portion
cucgugaaggauaagagaaa

SEQ ID NO: 1634 - RNA, 20 nt, Artificial Sequence
  LDLR targeting guide sequence portion
cucuaagccaaaccccuaaa

SEQ ID NO: 1635 - RNA, 20 nt, Artificial Sequence
  LDLR targeting guide sequence portion
cucuccaccgugacacaauc

SEQ ID NO: 1636 - RNA, 20 nt, Artificial Sequence
  LDLR targeting guide sequence portion
cucuccaggaaguuuugagu

SEQ ID NO: 1637 - RNA, 20 nt, Artificial Sequence
  LDLR targeting guide sequence portion
cucuccggacaucagugcaa

SEQ ID NO: 1638 - RNA, 20 nt, Artificial Sequence
  LDLR targeting guide sequence portion
cucucuguccccggcauuca

SEQ ID NO: 1639 - RNA, 20 nt, Artificial Sequence
  LDLR targeting guide sequence portion
cucugaaaugccucuucuuu

SEQ ID NO: 1640 - RNA, 20 nt, Artificial Sequence
  LDLR targeting guide sequence portion
cucugaacugagaaagugca

SEQ ID NO: 1641 - RNA, 20 nt, Artificial Sequence
  LDLR targeting guide sequence portion
cucugccucugggaaguggc

SEQ ID NO: 1642 - RNA, 20 nt, Artificial Sequence
  LDLR targeting guide sequence portion
cucuggcaggcaaugcuuug

SEQ ID NO: 1643 - RNA, 20 nt, Artificial Sequence
  LDLR targeting guide sequence portion
cucuggccaggcauggcgag

SEQ ID NO: 1644 - RNA, 20 nt, Artificial Sequence
  LDLR targeting guide sequence portion
cucugggaaguggcaucauu

SEQ ID NO: 1645 - RNA, 20 nt, Artificial Sequence
  LDLR targeting guide sequence portion
cucugggccugacauccccu

SEQ ID NO: 1646 - RNA, 20 nt, Artificial Sequence
  LDLR targeting guide sequence portion
cucuguccccggcauucauu

SEQ ID NO: 1647 - RNA, 20 nt, Artificial Sequence
  LDLR targeting guide sequence portion
cucugucuuugaauaaaaca

SEQ ID NO: 1648 - RNA, 20 nt, Artificial Sequence
  LDLR targeting guide sequence portion
cucuuaaaaaaugaauuugg

SEQ ID NO: 1649 - RNA, 20 nt, Artificial Sequence
  LDLR targeting guide sequence portion
cucuuauccuucacgaggaa

SEQ ID NO: 1650 - RNA, 20 nt, Artificial Sequence
  LDLR targeting guide sequence portion
cucuucuaugcaagccuugc

SEQ ID NO: 1651 - RNA, 20 nt, Artificial Sequence
  LDLR targeting guide sequence portion
cugaaauagggucuucaucu

SEQ ID NO: 1652 - RNA, 20 nt, Artificial Sequence
  LDLR targeting guide sequence portion
cugaaaucgccguguuacug

SEQ ID NO: 1653 - RNA, 20 nt, Artificial Sequence
  LDLR targeting guide sequence portion
cugaaaugccucuucuuuau

SEQ ID NO: 1654 - RNA, 20 nt, Artificial Sequence
  LDLR targeting guide sequence portion
cugaacaaauacagcaacca

SEQ ID NO: 1655 - RNA, 20 nt, Artificial Sequence
  LDLR targeting guide sequence portion
cugaacucaagugauccagc

SEQ ID NO: 1656 - RNA, 20 nt, Artificial Sequence
  LDLR targeting guide sequence portion
cugaacugagaaagugcaag

SEQ ID NO: 1657 - RNA, 20 nt, Artificial Sequence
  LDLR targeting guide sequence portion
cugaagucccgucaaacgau

SEQ ID NO: 1658 - RNA, 20 nt, Artificial Sequence
  LDLR targeting guide sequence portion
cugaauccgugguggcaccg

SEQ ID NO: 1659 - RNA, 20 nt, Artificial Sequence
  LDLR targeting guide sequence portion
cugaaugucuuacugugauc

SEQ ID NO: 1660 - RNA, 20 nt, Artificial Sequence
  LDLR targeting guide sequence portion
cugacagccacaccugggug

SEQ ID NO: 1661 - RNA, 20 nt, Artificial Sequence
  LDLR targeting guide sequence portion
cugacauccccuccccuuuc

SEQ ID NO: 1662 - RNA, 20 nt, Artificial Sequence
  LDLR targeting guide sequence portion
cugacggaggcugucacugu

SEQ ID NO: 1663 - RNA, 20 nt, Artificial Sequence
  LDLR targeting guide sequence portion
cugagaaagugcaaggagac

SEQ ID NO: 1664 - RNA, 20 nt, Artificial Sequence
  LDLR targeting guide sequence portion
cugagacacccgguuaccuu

SEQ ID NO: 1665 - RNA, 20 nt, Artificial Sequence
  LDLR targeting guide sequence portion
cugagaccucgccggccuug

SEQ ID NO: 1666 - RNA, 20 nt, Artificial Sequence
  LDLR targeting guide sequence portion
cugagcaacaaagcgagauc

SEQ ID NO: 1667 - RNA, 20 nt, Artificial Sequence
  LDLR targeting guide sequence portion
cugagcuggaucacuugagu

SEQ ID NO: 1668 - RNA, 20 nt, Artificial Sequence
  LDLR targeting guide sequence portion
cugagucacuggucacccuu

SEQ ID NO: 1669 - RNA, 20 nt, Artificial Sequence
  LDLR targeting guide sequence portion
cugaguuuagggguuuggcu

SEQ ID NO: 1670 - RNA, 20 nt, Artificial Sequence
  LDLR targeting guide sequence portion
cugauguccggagagacagu

SEQ ID NO: 1671 - RNA, 20 nt, Artificial Sequence
  LDLR targeting guide sequence portion
cugcacccagguguggcugu

SEQ ID NO: 1672 - RNA, 20 nt, Artificial Sequence
  LDLR targeting guide sequence portion
cugccagagcuuuguuuuau

SEQ ID NO: 1673 - RNA, 20 nt, Artificial Sequence
  LDLR targeting guide sequence portion
cugccauugucgucuuuaug

SEQ ID NO: 1674 - RNA, 20 nt, Artificial Sequence
  LDLR targeting guide sequence portion
cugcccagaacccuuccuga

SEQ ID NO: 1675 - RNA, 20 nt, Artificial Sequence
  LDLR targeting guide sequence portion
cugccccucucuguccccgg

SEQ ID NO: 1676 - RNA, 20 nt, Artificial Sequence
  LDLR targeting guide sequence portion
cugccucauccaccaaucuc

SEQ ID NO: 1677 - RNA, 20 nt, Artificial Sequence
  LDLR targeting guide sequence portion
cugccucccagaugaauaaa

SEQ ID NO: 1678 - RNA, 20 nt, Artificial Sequence
  LDLR targeting guide sequence portion
cugccucugggaaguggcau

SEQ ID NO: 1679 - RNA, 20 nt, Artificial Sequence
  LDLR targeting guide sequence portion
cugccuggagucccgucccu

SEQ ID NO: 1680 - RNA, 20 nt, Artificial Sequence
  LDLR targeting guide sequence portion
cugcgcccggccucaccgug

SEQ ID NO: 1681 - RNA, 20 nt, Artificial Sequence
  LDLR targeting guide sequence portion
cugcugaugcaccaugcaug

SEQ ID NO: 1682 - RNA, 20 nt, Artificial Sequence
  LDLR targeting guide sequence portion
cugcuguuguguguugaaag

SEQ ID NO: 1683 - RNA, 20 nt, Artificial Sequence
  LDLR targeting guide sequence portion
cugcuuuccagccugggcaa

SEQ ID NO: 1684 - RNA, 20 nt, Artificial Sequence
  LDLR targeting guide sequence portion
cuggaaagcaguggcauaau

SEQ ID NO: 1685 - RNA, 20 nt, Artificial Sequence
  LDLR targeting guide sequence portion
cuggacugugugcaacgcuu

SEQ ID NO: 1686 - RNA, 20 nt, Artificial Sequence
  LDLR targeting guide sequence portion
cuggagagaaauggaggugu

SEQ ID NO: 1687 - RNA, 20 nt, Artificial Sequence
  LDLR targeting guide sequence portion
cuggaggaugacguggcgug

SEQ ID NO: 1688 - RNA, 20 nt, Artificial Sequence
  LDLR targeting guide sequence portion
cuggagucccgucccugccc

SEQ ID NO: 1689 - RNA, 20 nt, Artificial Sequence
  LDLR targeting guide sequence portion
cuggaucacuugaguucagg

SEQ ID NO: 1690 - RNA, 20 nt, Artificial Sequence
  LDLR targeting guide sequence portion
cuggaucguuugacgggacu

SEQ ID NO: 1691 - RNA, 20 nt, Artificial Sequence
  LDLR targeting guide sequence portion
cuggcaggcaaugcuuuggu

SEQ ID NO: 1692 - RNA, 20 nt, Artificial Sequence
  LDLR targeting guide sequence portion
cuggccaaauucauuuuuua

SEQ ID NO: 1693 - RNA, 20 nt, Artificial Sequence
  LDLR targeting guide sequence portion
cuggccagaggccaugggcu

SEQ ID NO: 1694 - RNA, 20 nt, Artificial Sequence
  LDLR targeting guide sequence portion
cuggccaggcauggcgaggc

SEQ ID NO: 1695 - RNA, 20 nt, Artificial Sequence
  LDLR targeting guide sequence portion
cuggcccugccucauccacc

SEQ ID NO: 1696 - RNA, 20 nt, Artificial Sequence
  LDLR targeting guide sequence portion
cuggccugggaucccauccc

SEQ ID NO: 1697 - RNA, 20 nt, Artificial Sequence
  LDLR targeting guide sequence portion
cuggcugaauccgugguggc

SEQ ID NO: 1698 - RNA, 20 nt, Artificial Sequence
  LDLR targeting guide sequence portion
cuggcugucuagcaaggcuu

SEQ ID NO: 1699 - RNA, 20 nt, Artificial Sequence
  LDLR targeting guide sequence portion
cuggcuuaaggaagguacaa

SEQ ID NO: 1700 - RNA, 20 nt, Artificial Sequence
  LDLR targeting guide sequence portion
cugggaaguggcaucauuug

SEQ ID NO: 1701 - RNA, 20 nt, Artificial Sequence
  LDLR targeting guide sequence portion
cugggagaugggugucacuu

SEQ ID NO: 1702 - RNA, 20 nt, Artificial Sequence
  LDLR targeting guide sequence portion
cugggaggcagaacaggcuu

SEQ ID NO: 1703 - RNA, 20 nt, Artificial Sequence
  LDLR targeting guide sequence portion
cugggaucccaucccaacac

SEQ ID NO: 1704 - RNA, 20 nt, Artificial Sequence
  LDLR targeting guide sequence portion
cugggcagggacgggacucc

SEQ ID NO: 1705 - RNA, 20 nt, Artificial Sequence
  LDLR targeting guide sequence portion
cugggccugacauccccucc

SEQ ID NO: 1706 - RNA, 20 nt, Artificial Sequence
  LDLR targeting guide sequence portion
cuggggacaauugccaaucc

SEQ ID NO: 1707 - RNA, 20 nt, Artificial Sequence
  LDLR targeting guide sequence portion
cuggguacgguggcacgugc

SEQ ID NO: 1708 - RNA, 20 nt, Artificial Sequence
  LDLR targeting guide sequence portion
cugggugcaggccacguguc

SEQ ID NO: 1709 - RNA, 20 nt, Artificial Sequence
  LDLR targeting guide sequence portion
cugggugggucaugauucgg

SEQ ID NO: 1710 - RNA, 20 nt, Artificial Sequence
  LDLR targeting guide sequence portion
cuggucacccuuaauauuua

SEQ ID NO: 1711 - RNA, 20 nt, Artificial Sequence
  LDLR targeting guide sequence portion
cugguccccccgggccuguu

SEQ ID NO: 1712 - RNA, 20 nt, Artificial Sequence
  LDLR targeting guide sequence portion
cuggugcccauccucccgac

SEQ ID NO: 1713 - RNA, 20 nt, Artificial Sequence
  LDLR targeting guide sequence portion
cugguguccugacagccaca

SEQ ID NO: 1714 - RNA, 20 nt, Artificial Sequence
  LDLR targeting guide sequence portion
cugguugcuguauuuguuca

SEQ ID NO: 1715 - RNA, 20 nt, Artificial Sequence
  LDLR targeting guide sequence portion
cugguuucggagcacguaaa

SEQ ID NO: 1716 - RNA, 20 nt, Artificial Sequence
  LDLR targeting guide sequence portion
cuguacagauaguggggauu

SEQ ID NO: 1717 - RNA, 20 nt, Artificial Sequence
  LDLR targeting guide sequence portion
cuguacagggacgcauuuac

SEQ ID NO: 1718 - RNA, 20 nt, Artificial Sequence
  LDLR targeting guide sequence portion
cuguauagaagguuuuugua

SEQ ID NO: 1719 - RNA, 20 nt, Artificial Sequence
  LDLR targeting guide sequence portion
cuguauuuguucagugacua

SEQ ID NO: 1720 - RNA, 20 nt, Artificial Sequence
  LDLR targeting guide sequence portion
cugucacccccgaaucauga

SEQ ID NO: 1721 - RNA, 20 nt, Artificial Sequence
  LDLR targeting guide sequence portion
cugucacugucucuccggac

SEQ ID NO: 1722 - RNA, 20 nt, Artificial Sequence
  LDLR targeting guide sequence portion
cugucaggacaccagccugg

SEQ ID NO: 1723 - RNA, 20 nt, Artificial Sequence
  LDLR targeting guide sequence portion
cuguccccggcauucauuga

SEQ ID NO: 1724 - RNA, 20 nt, Artificial Sequence
  LDLR targeting guide sequence portion
cuguccgaagccuguucugc

SEQ ID NO: 1725 - RNA, 20 nt, Artificial Sequence
  LDLR targeting guide sequence portion
cugucuagcaaggcuugcau

SEQ ID NO: 1726 - RNA, 20 nt, Artificial Sequence
  LDLR targeting guide sequence portion
cugucucuccggacaucagu

SEQ ID NO: 1727 - RNA, 20 nt, Artificial Sequence
  LDLR targeting guide sequence portion
cugucuuugaauaaaacaag

SEQ ID NO: 1728 - RNA, 20 nt, Artificial Sequence
  LDLR targeting guide sequence portion
cuguguaggggguuauugcc

SEQ ID NO: 1729 - RNA, 20 nt, Artificial Sequence
  LDLR targeting guide sequence portion
cugugucuggccaaauucau

SEQ ID NO: 1730 - RNA, 20 nt, Artificial Sequence
  LDLR targeting guide sequence portion
cugugugcaacgcuuuuugg

SEQ ID NO: 1731 - RNA, 20 nt, Artificial Sequence
  LDLR targeting guide sequence portion
cuguucugccucccagauga

SEQ ID NO: 1732 - RNA, 20 nt, Artificial Sequence
  LDLR targeting guide sequence portion
cuguugcacugauguccgga

SEQ ID NO: 1733 - RNA, 20 nt, Artificial Sequence
  LDLR targeting guide sequence portion
cuguuguguguugaaagcca

SEQ ID NO: 1734 - RNA, 20 nt, Artificial Sequence
  LDLR targeting guide sequence portion
cuguuucucuuauccuucac

SEQ ID NO: 1735 - RNA, 20 nt, Artificial Sequence
  LDLR targeting guide sequence portion
cuguuuucugucgugugugu

SEQ ID NO: 1736 - RNA, 20 nt, Artificial Sequence
  LDLR targeting guide sequence portion
cuuaaaaaaugaauuuggcc

SEQ ID NO: 1737 - RNA, 20 nt, Artificial Sequence
  LDLR targeting guide sequence portion
cuuaagccaggaaagggauu

SEQ ID NO: 1738 - RNA, 20 nt, Artificial Sequence
  LDLR targeting guide sequence portion
cuuaaggaagguacaaaccc

SEQ ID NO: 1739 - RNA, 20 nt, Artificial Sequence
  LDLR targeting guide sequence portion
cuuaauaaauauuaagggug

SEQ ID NO: 1740 - RNA, 20 nt, Artificial Sequence
  LDLR targeting guide sequence portion
cuuaauauuuauuaagugcc

SEQ ID NO: 1741 - RNA, 20 nt, Artificial Sequence
  LDLR targeting guide sequence portion
cuuagagauugguggaugag

SEQ ID NO: 1742 - RNA, 20 nt, Artificial Sequence
  LDLR targeting guide sequence portion
cuuaucacgguucccugcac

SEQ ID NO: 1743 - RNA, 20 nt, Artificial Sequence
  LDLR targeting guide sequence portion
cuuauccuucacgaggaaag

SEQ ID NO: 1744 - RNA, 20 nt, Artificial Sequence
  LDLR targeting guide sequence portion
cuucaaagccgugaucguga

SEQ ID NO: 1745 - RNA, 20 nt, Artificial Sequence
  LDLR targeting guide sequence portion
cuucacgaggaaaggaagaa

SEQ ID NO: 1746 - RNA, 20 nt, Artificial Sequence
  LDLR targeting guide sequence portion
cuucacgcgggagucugacg

SEQ ID NO: 1747 - RNA, 20 nt, Artificial Sequence
  LDLR targeting guide sequence portion
cuucagguucuuucugaaau

SEQ ID NO: 1748 - RNA, 20 nt, Artificial Sequence
  LDLR targeting guide sequence portion
cuuccacuucuaugcaaaug

SEQ ID NO: 1749 - RNA, 20 nt, Artificial Sequence
  LDLR targeting guide sequence portion
cuuccauguuugaggauugu

SEQ ID NO: 1750 - RNA, 20 nt, Artificial Sequence
  LDLR targeting guide sequence portion
cuucccagaggcagagccug

SEQ ID NO: 1751 - RNA, 20 nt, Artificial Sequence
  LDLR targeting guide sequence portion
cuuccccaaucuugucguug

SEQ ID NO: 1752 - RNA, 20 nt, Artificial Sequence
  LDLR targeting guide sequence portion
cuuccugagaccucgccggc

SEQ ID NO: 1753 - RNA, 20 nt, Artificial Sequence
  LDLR targeting guide sequence portion
cuuccuggagagaaauggag

SEQ ID NO: 1754 - RNA, 20 nt, Artificial Sequence
  LDLR targeting guide sequence portion
cuuccuuaagccaggaaagg

SEQ ID NO: 1755 - RNA, 20 nt, Artificial Sequence
  LDLR targeting guide sequence portion
cuuccuuuccucgugaagga

SEQ ID NO: 1756 - RNA, 20 nt, Artificial Sequence
  LDLR targeting guide sequence portion
cuucggacagugcccaugca

SEQ ID NO: 1757 - RNA, 20 nt, Artificial Sequence
  LDLR targeting guide sequence portion
cuucuauacagugguuuaaa

SEQ ID NO: 1758 - RNA, 20 nt, Artificial Sequence
  LDLR targeting guide sequence portion
cuucuaugcaaaugccucca

SEQ ID NO: 1759 - RNA, 20 nt, Artificial Sequence
  LDLR targeting guide sequence portion
cuucuaugcaagccuugcua

SEQ ID NO: 1760 - RNA, 20 nt, Artificial Sequence
  LDLR targeting guide sequence portion
cuucucugggccugacaucc

SEQ ID NO: 1761 - RNA, 20 nt, Artificial Sequence
  LDLR targeting guide sequence portion
cuucucugucuuugaauaaa

SEQ ID NO: 1762 - RNA, 20 nt, Artificial Sequence
  LDLR targeting guide sequence portion
cuucugggagauggguguca

SEQ ID NO: 1763 - RNA, 20 nt, Artificial Sequence
  LDLR targeting guide sequence portion
cuugcacuuucucaguucag

SEQ ID NO: 1764 - RNA, 20 nt, Artificial Sequence
  LDLR targeting guide sequence portion
cuugcauagaagagguaaac

SEQ ID NO: 1765 - RNA, 20 nt, Artificial Sequence
  LDLR targeting guide sequence portion
cuugcuagacagccagguua

SEQ ID NO: 1766 - RNA, 20 nt, Artificial Sequence
  LDLR targeting guide sequence portion
cuugcuucucugggccugac

SEQ ID NO: 1767 - RNA, 20 nt, Artificial Sequence
  LDLR targeting guide sequence portion
cuuggaggcauuugcauaga

SEQ ID NO: 1768 - RNA, 20 nt, Artificial Sequence
  LDLR targeting guide sequence portion
cuuggccgugaggacacgug

SEQ ID NO: 1769 - RNA, 20 nt, Artificial Sequence
  LDLR targeting guide sequence portion
cuuggguugggauuuugguu

SEQ ID NO: 1770 - RNA, 20 nt, Artificial Sequence
  LDLR targeting guide sequence portion
cuugucguugauggguaugu

SEQ ID NO: 1771 - RNA, 20 nt, Artificial Sequence
  LDLR targeting guide sequence portion
cuugugacaucuucacgcgg

SEQ ID NO: 1772 - RNA, 20 nt, Artificial Sequence
  LDLR targeting guide sequence portion
cuuguuuuauucaaagacag

SEQ ID NO: 1773 - RNA, 20 nt, Artificial Sequence
  LDLR targeting guide sequence portion
cuuuauguacaaagauuauu

SEQ ID NO: 1774 - RNA, 20 nt, Artificial Sequence
  LDLR targeting guide sequence portion
cuuuauguccgcccaccuag

SEQ ID NO: 1775 - RNA, 20 nt, Artificial Sequence
  LDLR targeting guide sequence portion
cuuucaacacacaacagcag

SEQ ID NO: 1776 - RNA, 20 nt, Artificial Sequence
  LDLR targeting guide sequence portion
cuuucaucuuccauguuuga

SEQ ID NO: 1777 - RNA, 20 nt, Artificial Sequence
  LDLR targeting guide sequence portion
cuuucccuggccugggaucc

SEQ ID NO: 1778 - RNA, 20 nt, Artificial Sequence
  LDLR targeting guide sequence portion
cuuuccucgugaaggauaag

SEQ ID NO: 1779 - RNA, 20 nt, Artificial Sequence
  LDLR targeting guide sequence portion
cuuuccuggcuuaaggaagg

SEQ ID NO: 1780 - RNA, 20 nt, Artificial Sequence
  LDLR targeting guide sequence portion
cuuucgagguggguuuguac

SEQ ID NO: 1781 - RNA, 20 nt, Artificial Sequence
  LDLR targeting guide sequence portion
cuuucucaguucagaguugu

SEQ ID NO: 1782 - RNA, 20 nt, Artificial Sequence
  LDLR targeting guide sequence portion
cuuucugaaaucgccguguu

SEQ ID NO: 1783 - RNA, 20 nt, Artificial Sequence
  LDLR targeting guide sequence portion
cuuucugguuucggagcacg

SEQ ID NO: 1784 - RNA, 20 nt, Artificial Sequence
  LDLR targeting guide sequence portion
cuuugaagucccggucaacc

SEQ ID NO: 1785 - RNA, 20 nt, Artificial Sequence
  LDLR targeting guide sequence portion
cuuugaauaaaacaaggccg

SEQ ID NO: 1786 - RNA, 20 nt, Artificial Sequence
  LDLR targeting guide sequence portion
cuuugcccugucacccccga

SEQ ID NO: 1787 - RNA, 20 nt, Artificial Sequence
  LDLR targeting guide sequence portion
cuuugggaggcugagcugga

SEQ ID NO: 1788 - RNA, 20 nt, Artificial Sequence
  LDLR targeting guide sequence portion
cuuuggucuucucugucuuu

SEQ ID NO: 1789 - RNA, 20 nt, Artificial Sequence
  LDLR targeting guide sequence portion
cuuuguacauaaagaagagg

SEQ ID NO: 1790 - RNA, 20 nt, Artificial Sequence
  LDLR targeting guide sequence portion
cuuuguugcucaggccuggu

SEQ ID NO: 1791 - RNA, 20 nt, Artificial Sequence
  LDLR targeting guide sequence portion
cuuuuuaaaccacuguauag

SEQ ID NO: 1792 - RNA, 20 nt, Artificial Sequence
  LDLR targeting guide sequence portion
cuuuuugggagaaugauguc

SEQ ID NO: 1793 - RNA, 20 nt, Artificial Sequence
  LDLR targeting guide sequence portion
cuuuuugguuuuuguagaga

SEQ ID NO: 1794 - RNA, 20 nt, Artificial Sequence
  LDLR targeting guide sequence portion
gaaacaggcccggggggacc

SEQ ID NO: 1795 - RNA, 20 nt, Artificial Sequence
  LDLR targeting guide sequence portion
gaaaccaaaaucccaaccca

SEQ ID NO: 1796 - RNA, 20 nt, Artificial Sequence
  LDLR targeting guide sequence portion
gaaaccagaaaggcuuauca

SEQ ID NO: 1797 - RNA, 20 nt, Artificial Sequence
  LDLR targeting guide sequence portion
gaaacucaaaacuuccugga

SEQ ID NO: 1798 - RNA, 20 nt, Artificial Sequence
  LDLR targeting guide sequence portion
gaaagaaccugaagucccgu

SEQ ID NO: 1799 - RNA, 20 nt, Artificial Sequence
  LDLR targeting guide sequence portion
gaaagacacuggguggguca

SEQ ID NO: 1800 - RNA, 20 nt, Artificial Sequence
  LDLR targeting guide sequence portion
gaaagcaguggcauaaucau

SEQ ID NO: 1801 - RNA, 20 nt, Artificial Sequence
  LDLR targeting guide sequence portion
gaaagccacuugcuucucug

SEQ ID NO: 1802 - RNA, 20 nt, Artificial Sequence
  LDLR targeting guide sequence portion
gaaagcccgugucaaugaau

SEQ ID NO: 1803 - RNA, 20 nt, Artificial Sequence
  LDLR targeting guide sequence portion
gaaaggaagaaaccaaaauc

SEQ ID NO: 1804 - RNA, 20 nt, Artificial Sequence
  LDLR targeting guide sequence portion
gaaaggcuuaucacgguucc

SEQ ID NO: 1805 - RNA, 20 nt, Artificial Sequence
  LDLR targeting guide sequence portion
gaaagggauucauggcgucg

SEQ ID NO: 1806 - RNA, 20 nt, Artificial Sequence
  LDLR targeting guide sequence portion
gaaaggggaggggaugucag

SEQ ID NO: 1807 - RNA, 20 nt, Artificial Sequence
  LDLR targeting guide sequence portion
gaaagugcaaggagaccacg

SEQ ID NO: 1808 - RNA, 20 nt, Artificial Sequence
  LDLR targeting guide sequence portion
gaaaucgccguguuacuguu

SEQ ID NO: 1809 - RNA, 20 nt, Artificial Sequence
  LDLR targeting guide sequence portion
gaaaugaucuggcugaaucc

SEQ ID NO: 1810 - RNA, 20 nt, Artificial Sequence
  LDLR targeting guide sequence portion
gaaaugccucuucuuuaugu

SEQ ID NO: 1811 - RNA, 20 nt, Artificial Sequence
  LDLR targeting guide sequence portion
gaaauggaggugucauccug

SEQ ID NO: 1812 - RNA, 20 nt, Artificial Sequence
  LDLR targeting guide sequence portion
gaacaaauacagcaaccagg

SEQ ID NO: 1813 - RNA, 20 nt, Artificial Sequence
  LDLR targeting guide sequence portion
gaacaggcuucggacagugc

SEQ ID NO: 1814 - RNA, 20 nt, Artificial Sequence
  LDLR targeting guide sequence portion
gaacaucugccuggaguccc

SEQ ID NO: 1815 - RNA, 20 nt, Artificial Sequence
  LDLR targeting guide sequence portion
gaacccuuccugagaccucg

SEQ ID NO: 1816 - RNA, 20 nt, Artificial Sequence
  LDLR targeting guide sequence portion
gaaccgugauaagccuuucu

SEQ ID NO: 1817 - RNA, 20 nt, Artificial Sequence
  LDLR targeting guide sequence portion
gaaccugaagucccgucaaa

SEQ ID NO: 1818 - RNA, 20 nt, Artificial Sequence
  LDLR targeting guide sequence portion
gaacucaagugauccagcuc

SEQ ID NO: 1819 - RNA, 20 nt, Artificial Sequence
  LDLR targeting guide sequence portion
gaacugagaaagugcaagga

SEQ ID NO: 1820 - RNA, 20 nt, Artificial Sequence
  LDLR targeting guide sequence portion
gaacugccauugucgucuuu

SEQ ID NO: 1821 - RNA, 20 nt, Artificial Sequence
  LDLR targeting guide sequence portion
gaacuggacugugugcaacg

SEQ ID NO: 1822 - RNA, 20 nt, Artificial Sequence
  LDLR targeting guide sequence portion
gaagaaaccaaaaucccaac

SEQ ID NO: 1823 - RNA, 20 nt, Artificial Sequence
  LDLR targeting guide sequence portion
gaagaccaaagcauugccug

SEQ ID NO: 1824 - RNA, 20 nt, Artificial Sequence
  LDLR targeting guide sequence portion
gaagacccuauuucagaaau

SEQ ID NO: 1825 - RNA, 20 nt, Artificial Sequence
  LDLR targeting guide sequence portion
gaagaggcauuucagaggca

SEQ ID NO: 1826 - RNA, 20 nt, Artificial Sequence
  LDLR targeting guide sequence portion
gaagagguaaacacguugac

SEQ ID NO: 1827 - RNA, 20 nt, Artificial Sequence
  LDLR targeting guide sequence portion
gaagaugaaaggggagggga

SEQ ID NO: 1828 - RNA, 20 nt, Artificial Sequence
  LDLR targeting guide sequence portion
gaagaugucacaagggauug

SEQ ID NO: 1829 - RNA, 20 nt, Artificial Sequence
  LDLR targeting guide sequence portion
gaagcaaguggcuuucaaca

SEQ ID NO: 1830 - RNA, 20 nt, Artificial Sequence
  LDLR targeting guide sequence portion
gaagcacuaggugggcggac

SEQ ID NO: 1831 - RNA, 20 nt, Artificial Sequence
  LDLR targeting guide sequence portion
gaagccacucauacauacaa

SEQ ID NO: 1832 - RNA, 20 nt, Artificial Sequence
  LDLR targeting guide sequence portion
gaagccuguucugccuccca

SEQ ID NO: 1833 - RNA, 20 nt, Artificial Sequence
  LDLR targeting guide sequence portion
gaaggauaagagaaacaggc

SEQ ID NO: 1834 - RNA, 20 nt, Artificial Sequence
  LDLR targeting guide sequence portion
gaaggguucugggcagggac

SEQ ID NO: 1835 - RNA, 20 nt, Artificial Sequence
  LDLR targeting guide sequence portion
gaagguacaaacccaccucg

SEQ ID NO: 1836 - RNA, 20 nt, Artificial Sequence
  LDLR targeting guide sequence portion
gaagguuuuuguagccugaa

SEQ ID NO: 1837 - RNA, 20 nt, Artificial Sequence
  LDLR targeting guide sequence portion
gaagucccggucaaccugcc

SEQ ID NO: 1838 - RNA, 20 nt, Artificial Sequence
  LDLR targeting guide sequence portion
gaagucccgucaaacgaucc

SEQ ID NO: 1839 - RNA, 20 nt, Artificial Sequence
  LDLR targeting guide sequence portion
gaagugaauggcuuggaggc

SEQ ID NO: 1840 - RNA, 20 nt, Artificial Sequence
  LDLR targeting guide sequence portion
gaaguggaagcacuaggugg

SEQ ID NO: 1841 - RNA, 20 nt, Artificial Sequence
  LDLR targeting guide sequence portion
gaaguggcaucauuugguga

SEQ ID NO: 1842 - RNA, 20 nt, Artificial Sequence
  LDLR targeting guide sequence portion
gaaguggguaggggucggga

SEQ ID NO: 1843 - RNA, 20 nt, Artificial Sequence
  LDLR targeting guide sequence portion
gaaguuuugaguuucucucc

SEQ ID NO: 1844 - RNA, 20 nt, Artificial Sequence
  LDLR targeting guide sequence portion
gaauaaaacaaggccggcga

SEQ ID NO: 1845 - RNA, 20 nt, Artificial Sequence
  LDLR targeting guide sequence portion
gaauagucacugaacaaaua

SEQ ID NO: 1846 - RNA, 20 nt, Artificial Sequence
  LDLR targeting guide sequence portion
gaauaucgagaacugccauu

SEQ ID NO: 1847 - RNA, 20 nt, Artificial Sequence
  LDLR targeting guide sequence portion
gaaucaugacccacccagug

SEQ ID NO: 1848 - RNA, 20 nt, Artificial Sequence
  LDLR targeting guide sequence portion
gaaucccuuuccuggcuuaa

SEQ ID NO: 1849 - RNA, 20 nt, Artificial Sequence
  LDLR targeting guide sequence portion
gaauccgugguggcaccgag

SEQ ID NO: 1850 - RNA, 20 nt, Artificial Sequence
  LDLR targeting guide sequence portion
gaaugaguuuggucucggug

SEQ ID NO: 1851 - RNA, 20 nt, Artificial Sequence
  LDLR targeting guide sequence portion
gaaugauguccccguuguau

SEQ ID NO: 1852 - RNA, 20 nt, Artificial Sequence
  LDLR targeting guide sequence portion
gaaugccggggacagagagg

SEQ ID NO: 1853 - RNA, 20 nt, Artificial Sequence
  LDLR targeting guide sequence portion
gaauggaaguggguaggggu

SEQ ID NO: 1854 - RNA, 20 nt, Artificial Sequence
  LDLR targeting guide sequence portion
gaauggcuuggaggcauuug

SEQ ID NO: 1855 - RNA, 20 nt, Artificial Sequence
  LDLR targeting guide sequence portion
gaauuuggccagacacaggu

SEQ ID NO: 1856 - RNA, 20 nt, Artificial Sequence
  LDLR targeting guide sequence portion
gacaagauuggggaagugaa

SEQ ID NO: 1857 - RNA, 20 nt, Artificial Sequence
  LDLR targeting guide sequence portion
gacaauggcaguucucgaua

SEQ ID NO: 1858 - RNA, 20 nt, Artificial Sequence
  LDLR targeting guide sequence portion
gacaauugccaaucccuugu

SEQ ID NO: 1859 - RNA, 20 nt, Artificial Sequence
  LDLR targeting guide sequence portion
gacacaauccucaaacaugg

SEQ ID NO: 1860 - RNA, 20 nt, Artificial Sequence
  LDLR targeting guide sequence portion
gacacaggugccucacgccu

SEQ ID NO: 1861 - RNA, 20 nt, Artificial Sequence
  LDLR targeting guide sequence portion
gacacaguguuuugucccug

SEQ ID NO: 1862 - RNA, 20 nt, Artificial Sequence
  LDLR targeting guide sequence portion
gacaccagccuggugcccau

SEQ ID NO: 1863 - RNA, 20 nt, Artificial Sequence
  LDLR targeting guide sequence portion
gacacccaucucccagaagc

SEQ ID NO: 1864 - RNA, 20 nt, Artificial Sequence
  LDLR targeting guide sequence portion
gacaccuccauuucucucca

SEQ ID NO: 1865 - RNA, 20 nt, Artificial Sequence
  LDLR targeting guide sequence portion
gacacgggcuuucccuggcc

SEQ ID NO: 1866 - RNA, 20 nt, Artificial Sequence
  LDLR targeting guide sequence portion
gacacguggccugcacccag

SEQ ID NO: 1867 - RNA, 20 nt, Artificial Sequence
  LDLR targeting guide sequence portion
gacacugggugggucaugau

SEQ ID NO: 1868 - RNA, 20 nt, Artificial Sequence
  LDLR targeting guide sequence portion
gacagaaaacagugcaaaau

SEQ ID NO: 1869 - RNA, 20 nt, Artificial Sequence
  LDLR targeting guide sequence portion
gacagagaagaccaaagcau

SEQ ID NO: 1870 - RNA, 20 nt, Artificial Sequence
  LDLR targeting guide sequence portion
gacagagaggggcagguuga

SEQ ID NO: 1871 - RNA, 20 nt, Artificial Sequence
  LDLR targeting guide sequence portion
gacagauggucagucuggag

SEQ ID NO: 1872 - RNA, 20 nt, Artificial Sequence
  LDLR targeting guide sequence portion
gacagccacaccugggugca

SEQ ID NO: 1873 - RNA, 20 nt, Artificial Sequence
  LDLR targeting guide sequence portion
gacagccagguuagccuuug

SEQ ID NO: 1874 - RNA, 20 nt, Artificial Sequence
  LDLR targeting guide sequence portion
gacagccucaaaugccugag

SEQ ID NO: 1875 - RNA, 20 nt, Artificial Sequence
  LDLR targeting guide sequence portion
gacagccuccgucagacucc

SEQ ID NO: 1876 - RNA, 20 nt, Artificial Sequence
  LDLR targeting guide sequence portion
gacagggcaaaggcuaaccu

SEQ ID NO: 1877 - RNA, 20 nt, Artificial Sequence
  LDLR targeting guide sequence portion
gacagugacagccuccguca

SEQ ID NO: 1878 - RNA, 20 nt, Artificial Sequence
  LDLR targeting guide sequence portion
gacagugcccaugcaauggc

SEQ ID NO: 1879 - RNA, 20 nt, Artificial Sequence
  LDLR targeting guide sequence portion
gacauaaagacgacaauggc

SEQ ID NO: 1880 - RNA, 20 nt, Artificial Sequence
  LDLR targeting guide sequence portion
gacaucagugcaacaguaac

SEQ ID NO: 1881 - RNA, 20 nt, Artificial Sequence
  LDLR targeting guide sequence portion
gacaucauucucccaaaaag

SEQ ID NO: 1882 - RNA, 20 nt, Artificial Sequence
  LDLR targeting guide sequence portion
gacauccccuccccuuucau

SEQ ID NO: 1883 - RNA, 20 nt, Artificial Sequence
  LDLR targeting guide sequence portion
gacaucuucacgcgggaguc

SEQ ID NO: 1884 - RNA, 20 nt, Artificial Sequence
  LDLR targeting guide sequence portion
gacauucaggcuacaaaaac

SEQ ID NO: 1885 - RNA, 20 nt, Artificial Sequence
  LDLR targeting guide sequence portion
gaccaaacucauucaccaaa

SEQ ID NO: 1886 - RNA, 20 nt, Artificial Sequence
  LDLR targeting guide sequence portion
gaccaaagcauugccugcca

SEQ ID NO: 1887 - RNA, 20 nt, Artificial Sequence
  LDLR targeting guide sequence portion
gaccacgggaauggaagugg

SEQ ID NO: 1888 - RNA, 20 nt, Artificial Sequence
  LDLR targeting guide sequence portion
gaccaggaugacaccuccau

SEQ ID NO: 1889 - RNA, 20 nt, Artificial Sequence
  LDLR targeting guide sequence portion
gaccaggccugagcaacaaa

SEQ ID NO: 1890 - RNA, 20 nt, Artificial Sequence
  LDLR targeting guide sequence portion
gaccagugacucaggcucug

SEQ ID NO: 1891 - RNA, 20 nt, Artificial Sequence
  LDLR targeting guide sequence portion
gacccacccagugucuuucg

SEQ ID NO: 1892 - RNA, 20 nt, Artificial Sequence
  LDLR targeting guide sequence portion
gaccccaucucuuaaaaaau

SEQ ID NO: 1893 - RNA, 20 nt, Artificial Sequence
  LDLR targeting guide sequence portion
gacccccuggcccugccuca

SEQ ID NO: 1894 - RNA, 20 nt, Artificial Sequence
  LDLR targeting guide sequence portion
gacccuauuucagaaauaca

SEQ ID NO: 1895 - RNA, 20 nt, Artificial Sequence
  LDLR targeting guide sequence portion
gaccgggacuucaaagccgu

SEQ ID NO: 1896 - RNA, 20 nt, Artificial Sequence
  LDLR targeting guide sequence portion
gaccucgccggccuuguuuu

SEQ ID NO: 1897 - RNA, 20 nt, Artificial Sequence
  LDLR targeting guide sequence portion
gacgcauuuacgugcuccga

SEQ ID NO: 1898 - RNA, 20 nt, Artificial Sequence
  LDLR targeting guide sequence portion
gacgccaugaaucccuuucc

SEQ ID NO: 1899 - RNA, 20 nt, Artificial Sequence
  LDLR targeting guide sequence portion
gacggaggcugucacugucu

SEQ ID NO: 1900 - RNA, 20 nt, Artificial Sequence
  LDLR targeting guide sequence portion
gacgggacuccaggcagaug

SEQ ID NO: 1901 - RNA, 20 nt, Artificial Sequence
  LDLR targeting guide sequence portion
gacgggacuucagguucuuu

SEQ ID NO: 1902 - RNA, 20 nt, Artificial Sequence
  LDLR targeting guide sequence portion
gacguggcgugaacaucugc

SEQ ID NO: 1903 - RNA, 20 nt, Artificial Sequence
  LDLR targeting guide sequence portion
gacuauucucggggcccugu

SEQ ID NO: 1904 - RNA, 20 nt, Artificial Sequence
  LDLR targeting guide sequence portion
gacucaggcucugccucugg

SEQ ID NO: 1905 - RNA, 20 nt, Artificial Sequence
  LDLR targeting guide sequence portion
gacuccaggcagauguucac

SEQ ID NO: 1906 - RNA, 20 nt, Artificial Sequence
  LDLR targeting guide sequence portion
gacucccgcgugaagauguc

SEQ ID NO: 1907 - RNA, 20 nt, Artificial Sequence
  LDLR targeting guide sequence portion
gacuccugaguuuagggguu

SEQ ID NO: 1908 - RNA, 20 nt, Artificial Sequence
  LDLR targeting guide sequence portion
gacugugugcaacgcuuuuu

SEQ ID NO: 1909 - RNA, 20 nt, Artificial Sequence
  LDLR targeting guide sequence portion
gacuucaaagccgugaucgu

SEQ ID NO: 1910 - RNA, 20 nt, Artificial Sequence
  LDLR targeting guide sequence portion
gacuucagguucuuucugaa

SEQ ID NO: 1911 - RNA, 20 nt, Artificial Sequence
  LDLR targeting guide sequence portion
gagaaacaggcccgggggga

SEQ ID NO: 1912 - RNA, 20 nt, Artificial Sequence
  LDLR targeting guide sequence portion
gagaaacucaaaacuuccug

SEQ ID NO: 1913 - RNA, 20 nt, Artificial Sequence
  LDLR targeting guide sequence portion
gagaaagugcaaggagacca

SEQ ID NO: 1914 - RNA, 20 nt, Artificial Sequence
  LDLR targeting guide sequence portion
gagaaauggaggugucaucc

SEQ ID NO: 1915 - RNA, 20 nt, Artificial Sequence
  LDLR targeting guide sequence portion
gagaacugccauugucgucu

SEQ ID NO: 1916 - RNA, 20 nt, Artificial Sequence
  LDLR targeting guide sequence portion
gagaagaccaaagcauugcc

SEQ ID NO: 1917 - RNA, 20 nt, Artificial Sequence
  LDLR targeting guide sequence portion
gagaagcaaguggcuuucaa

SEQ ID NO: 1918 - RNA, 20 nt, Artificial Sequence
  LDLR targeting guide sequence portion
gagaauagucacugaacaaa

SEQ ID NO: 1919 - RNA, 20 nt, Artificial Sequence
  LDLR targeting guide sequence portion
gagaaugauguccccguugu

SEQ ID NO: 1920 - RNA, 20 nt, Artificial Sequence
  LDLR targeting guide sequence portion
gagacacccgguuaccuugg

SEQ ID NO: 1921 - RNA, 20 nt, Artificial Sequence
  LDLR targeting guide sequence portion
gagacagauggucagucugg

SEQ ID NO: 1922 - RNA, 20 nt, Artificial Sequence
  LDLR targeting guide sequence portion
gagacagugacagccuccgu

SEQ ID NO: 1923 - RNA, 20 nt, Artificial Sequence
  LDLR targeting guide sequence portion
gagaccaaacucauucacca

SEQ ID NO: 1924 - RNA, 20 nt, Artificial Sequence
  LDLR targeting guide sequence portion
gagaccacgggaauggaagu

SEQ ID NO: 1925 - RNA, 20 nt, Artificial Sequence
  LDLR targeting guide sequence portion
gagaccaggccugagcaaca

SEQ ID NO: 1926 - RNA, 20 nt, Artificial Sequence
  LDLR targeting guide sequence portion
gagaccucgccggccuuguu

SEQ ID NO: 1927 - RNA, 20 nt, Artificial Sequence
  LDLR targeting guide sequence portion
gagagaaacucaaaacuucc

SEQ ID NO: 1928 - RNA, 20 nt, Artificial Sequence
  LDLR targeting guide sequence portion
gagagaaauggaggugucau

SEQ ID NO: 1929 - RNA, 20 nt, Artificial Sequence
  LDLR targeting guide sequence portion
gagagacagugacagccucc

SEQ ID NO: 1930 - RNA, 20 nt, Artificial Sequence
  LDLR targeting guide sequence portion
gagaggggcagguugaccgg

SEQ ID NO: 1931 - RNA, 20 nt, Artificial Sequence
  LDLR targeting guide sequence portion
gagaugggaucucgcuuugu

SEQ ID NO: 1932 - RNA, 20 nt, Artificial Sequence
  LDLR targeting guide sequence portion
gagaugggugucacuuuuua

SEQ ID NO: 1933 - RNA, 20 nt, Artificial Sequence
  LDLR targeting guide sequence portion
gagauugguggaugaggcag

SEQ ID NO: 1934 - RNA, 20 nt, Artificial Sequence
  LDLR targeting guide sequence portion
gagcaacaaagcgagauccc

SEQ ID NO: 1935 - RNA, 20 nt, Artificial Sequence
  LDLR targeting guide sequence portion
gagcacguaaaugcgucccu

SEQ ID NO: 1936 - RNA, 20 nt, Artificial Sequence
  LDLR targeting guide sequence portion
gagccugagucacuggucac

SEQ ID NO: 1937 - RNA, 20 nt, Artificial Sequence
  LDLR targeting guide sequence portion
gagcuaugauuaugccacug

SEQ ID NO: 1938 - RNA, 20 nt, Artificial Sequence
  LDLR targeting guide sequence portion
gagcucaggcauuugaggcu

SEQ ID NO: 1939 - RNA, 20 nt, Artificial Sequence
  LDLR targeting guide sequence portion
gagcuggaucacuugaguuc

SEQ ID NO: 1940 - RNA, 20 nt, Artificial Sequence
  LDLR targeting guide sequence portion
gaggaaaggaagaaaccaaa

SEQ ID NO: 1941 - RNA, 20 nt, Artificial Sequence
  LDLR targeting guide sequence portion
gaggacacguggccugcacc

SEQ ID NO: 1942 - RNA, 20 nt, Artificial Sequence
  LDLR targeting guide sequence portion
gaggaugacguggcgugaac

SEQ ID NO: 1943 - RNA, 20 nt, Artificial Sequence
  LDLR targeting guide sequence portion
gaggaugggcaccaggcugg

SEQ ID NO: 1944 - RNA, 20 nt, Artificial Sequence
  LDLR targeting guide sequence portion
gaggaugguuugagcucagg

SEQ ID NO: 1945 - RNA, 20 nt, Artificial Sequence
  LDLR targeting guide sequence portion
gaggauugugucacggugga

SEQ ID NO: 1946 - RNA, 20 nt, Artificial Sequence
  LDLR targeting guide sequence portion
gaggcaauaacccccuacac

SEQ ID NO: 1947 - RNA, 20 nt, Artificial Sequence
  LDLR targeting guide sequence portion
gaggcaccugugucuggcca

SEQ ID NO: 1948 - RNA, 20 nt, Artificial Sequence
  LDLR targeting guide sequence portion
gaggcagaacaggcuucgga

SEQ ID NO: 1949 - RNA, 20 nt, Artificial Sequence
  LDLR targeting guide sequence portion
gaggcagagccugagucacu

SEQ ID NO: 1950 - RNA, 20 nt, Artificial Sequence
  LDLR targeting guide sequence portion
gaggcagggccagggggucc

SEQ ID NO: 1951 - RNA, 20 nt, Artificial Sequence
  LDLR targeting guide sequence portion
gaggcauuucagaggcaaua

SEQ ID NO: 1952 - RNA, 20 nt, Artificial Sequence
  LDLR targeting guide sequence portion
gaggcauuugcauagaagug

SEQ ID NO: 1953 - RNA, 20 nt, Artificial Sequence
  LDLR targeting guide sequence portion
gaggccaugggcugcugaug

SEQ ID NO: 1954 - RNA, 20 nt, Artificial Sequence
  LDLR targeting guide sequence portion
gaggcugagcuggaucacuu

SEQ ID NO: 1955 - RNA, 20 nt, Artificial Sequence
  LDLR targeting guide sequence portion
gaggcugucacugucucucc

SEQ ID NO: 1956 - RNA, 20 nt, Artificial Sequence
  LDLR targeting guide sequence portion
gaggggaugucaggcccaga

SEQ ID NO: 1957 - RNA, 20 nt, Artificial Sequence
  LDLR targeting guide sequence portion
gaggggcagguugaccggga

SEQ ID NO: 1958 - RNA, 20 nt, Artificial Sequence
  LDLR targeting guide sequence portion
gagguaaacacguugacucc

SEQ ID NO: 1959 - RNA, 20 nt, Artificial Sequence
  LDLR targeting guide sequence portion
gaggucucaggaaggguucu

SEQ ID NO: 1960 - RNA, 20 nt, Artificial Sequence
  LDLR targeting guide sequence portion
gagguggguuuguaccuucc

SEQ ID NO: 1961 - RNA, 20 nt, Artificial Sequence
  LDLR targeting guide sequence portion
gaggugucauccuggucccc

SEQ ID NO: 1962 - RNA, 20 nt, Artificial Sequence
  LDLR targeting guide sequence portion
gagucaacguguuuaccucu

SEQ ID NO: 1963 - RNA, 20 nt, Artificial Sequence
  LDLR targeting guide sequence portion
gagucacuggucacccuuaa

SEQ ID NO: 1964 - RNA, 20 nt, Artificial Sequence
  LDLR targeting guide sequence portion
gagucccgucccugcccaga

SEQ ID NO: 1965 - RNA, 20 nt, Artificial Sequence
  LDLR targeting guide sequence portion
gagucugacggaggcuguca

SEQ ID NO: 1966 - RNA, 20 nt, Artificial Sequence
  LDLR targeting guide sequence portion
gaguggcuucugggagaugg

SEQ ID NO: 1967 - RNA, 20 nt, Artificial Sequence
  LDLR targeting guide sequence portion
gaguucaggaguuggagacc

SEQ ID NO: 1968 - RNA, 20 nt, Artificial Sequence
  LDLR targeting guide sequence portion
gaguuggagaccaggccuga

SEQ ID NO: 1969 - RNA, 20 nt, Artificial Sequence
  LDLR targeting guide sequence portion
gaguuguacacuguguacau

SEQ ID NO: 1970 - RNA, 20 nt, Artificial Sequence
  LDLR targeting guide sequence portion
gaguuuagggguuuggcuua

SEQ ID NO: 1971 - RNA, 20 nt, Artificial Sequence
  LDLR targeting guide sequence portion
gaguuuggucucggugccac

SEQ ID NO: 1972 - RNA, 20 nt, Artificial Sequence
  LDLR targeting guide sequence portion
gauaagagaaacaggcccgg

SEQ ID NO: 1973 - RNA, 20 nt, Artificial Sequence
  LDLR targeting guide sequence portion
gauaagccuuucugguuucg

SEQ ID NO: 1974 - RNA, 20 nt, Artificial Sequence
  LDLR targeting guide sequence portion
gauaguggggauuuuuuguu

SEQ ID NO: 1975 - RNA, 20 nt, Artificial Sequence
  LDLR targeting guide sequence portion
gauauucacgaucacggcuu

SEQ ID NO: 1976 - RNA, 20 nt, Artificial Sequence
  LDLR targeting guide sequence portion
gaucacaggcacgugccacc

SEQ ID NO: 1977 - RNA, 20 nt, Artificial Sequence
  LDLR targeting guide sequence portion
gaucacaguaagacauucag

SEQ ID NO: 1978 - RNA, 20 nt, Artificial Sequence
  LDLR targeting guide sequence portion
gaucacggcuuugaaguccc

SEQ ID NO: 1979 - RNA, 20 nt, Artificial Sequence
  LDLR targeting guide sequence portion
gaucauuuccgacgccauga

SEQ ID NO: 1980 - RNA, 20 nt, Artificial Sequence
  LDLR targeting guide sequence portion
gauccagacuggaggauuua

SEQ ID NO: 1981 - RNA, 20 nt, Artificial Sequence
  LDLR targeting guide sequence portion
gauccagcucagccucccaa

SEQ ID NO: 1982 - RNA, 20 nt, Artificial Sequence
  LDLR targeting guide sequence portion
gaucccaggccagggaaagc

SEQ ID NO: 1983 - RNA, 20 nt, Artificial Sequence
  LDLR targeting guide sequence portion
gaucccaucccaacacacac

SEQ ID NO: 1984 - RNA, 20 nt, Artificial Sequence
  LDLR targeting guide sequence portion
gaucccaucucuacaaaaac

SEQ ID NO: 1985 - RNA, 20 nt, Artificial Sequence
  LDLR targeting guide sequence portion
gaucgugaauaucgagaacu

SEQ ID NO: 1986 - RNA, 20 nt, Artificial Sequence
  LDLR targeting guide sequence portion
gaucguuugacgggacuuca

SEQ ID NO: 1987 - RNA, 20 nt, Artificial Sequence
  LDLR targeting guide sequence portion
gaucuggcugaauccguggu

SEQ ID NO: 1988 - RNA, 20 nt, Artificial Sequence
  LDLR targeting guide sequence portion
gaugaaaggggaggggaugu

SEQ ID NO: 1989 - RNA, 20 nt, Artificial Sequence
  LDLR targeting guide sequence portion
gaugaagacccuauuucaga

SEQ ID NO: 1990 - RNA, 20 nt, Artificial Sequence
  LDLR targeting guide sequence portion
gaugacaccuccauuucucu

SEQ ID NO: 1991 - RNA, 20 nt, Artificial Sequence
  LDLR targeting guide sequence portion
gaugacguggcgugaacauc

SEQ ID NO: 1992 - RNA, 20 nt, Artificial Sequence
  LDLR targeting guide sequence portion
gaugaggcagggccaggggg

SEQ ID NO: 1993 - RNA, 20 nt, Artificial Sequence
  LDLR targeting guide sequence portion
gaugccacuucccagaggca

SEQ ID NO: 1994 - RNA, 20 nt, Artificial Sequence
  LDLR targeting guide sequence portion
gauggcaccaacgggacccc

SEQ ID NO: 1995 - RNA, 20 nt, Artificial Sequence
  LDLR targeting guide sequence portion
gaugggaucccaggccaggg

SEQ ID NO: 1996 - RNA, 20 nt, Artificial Sequence
  LDLR targeting guide sequence portion
gaugggaucucgcuuuguug

SEQ ID NO: 1997 - RNA, 20 nt, Artificial Sequence
  LDLR targeting guide sequence portion
gaugggcaccaggcuggugu

SEQ ID NO: 1998 - RNA, 20 nt, Artificial Sequence
  LDLR targeting guide sequence portion
gauggguauguguuuaaaac

SEQ ID NO: 1999 - RNA, 20 nt, Artificial Sequence
  LDLR targeting guide sequence portion
gaugggugucacuuuuuaaa

SEQ ID NO: 2000 - RNA, 20 nt, Artificial Sequence
  LDLR targeting guide sequence portion
gauggucagucuggaggaug

SEQ ID NO: 2001 - RNA, 20 nt, Artificial Sequence
  LDLR targeting guide sequence portion
gaugguuugagcucaggcau

SEQ ID NO: 2002 - RNA, 20 nt, Artificial Sequence
  LDLR targeting guide sequence portion
gaugucacaagggauuggca

SEQ ID NO: 2003 - RNA, 20 nt, Artificial Sequence
  LDLR targeting guide sequence portion
gaugucaggcccagagaagc

SEQ ID NO: 2004 - RNA, 20 nt, Artificial Sequence
  LDLR targeting guide sequence portion
gauguccccguuguauguau

SEQ ID NO: 2005 - RNA, 20 nt, Artificial Sequence
  LDLR targeting guide sequence portion
gauguccggagagacaguga

SEQ ID NO: 2006 - RNA, 20 nt, Artificial Sequence
  LDLR targeting guide sequence portion
gauguucacgccacgucauc

SEQ ID NO: 2007 - RNA, 20 nt, Artificial Sequence
  LDLR targeting guide sequence portion
gauuacaggcgugaggcacc

SEQ ID NO: 2008 - RNA, 20 nt, Artificial Sequence
  LDLR targeting guide sequence portion
gauuaugccacugcuuucca

SEQ ID NO: 2009 - RNA, 20 nt, Artificial Sequence
  LDLR targeting guide sequence portion
gauuauuugcacgaacugga

SEQ ID NO: 2010 - RNA, 20 nt, Artificial Sequence
  LDLR targeting guide sequence portion
gauucagccagaucauuucc

SEQ ID NO: 2011 - RNA, 20 nt, Artificial Sequence
  LDLR targeting guide sequence portion
gauucauggcgucggaaaug

SEQ ID NO: 2012 - RNA, 20 nt, Artificial Sequence
  LDLR targeting guide sequence portion
gauucgggggugacagggca

SEQ ID NO: 2013 - RNA, 20 nt, Artificial Sequence
  LDLR targeting guide sequence portion
gauuggcaauuguccccagg

SEQ ID NO: 2014 - RNA, 20 nt, Artificial Sequence
  LDLR targeting guide sequence portion
gauuggggaagugaauggcu

SEQ ID NO: 2015 - RNA, 20 nt, Artificial Sequence
  LDLR targeting guide sequence portion
gauugguggaugaggcaggg

SEQ ID NO: 2016 - RNA, 20 nt, Artificial Sequence
  LDLR targeting guide sequence portion
gauugugucacgguggagag

SEQ ID NO: 2017 - RNA, 20 nt, Artificial Sequence
  LDLR targeting guide sequence portion
gauuucagaaagaaccugaa

SEQ ID NO: 2018 - RNA, 20 nt, Artificial Sequence
  LDLR targeting guide sequence portion
gauuuugguuucuuccuuuc

SEQ ID NO: 2019 - RNA, 20 nt, Artificial Sequence
  LDLR targeting guide sequence portion
gcaaacauaacaaaaaaucc

SEQ ID NO: 2020 - RNA, 20 nt, Artificial Sequence
  LDLR targeting guide sequence portion
gcaaacccugguugcuguau

SEQ ID NO: 2021 - RNA, 20 nt, Artificial Sequence
  LDLR targeting guide sequence portion
gcaaaggcuaaccuggcugu

SEQ ID NO: 2022 - RNA, 20 nt, Artificial Sequence
  LDLR targeting guide sequence portion
gcaaaugccuccaagccauu

SEQ ID NO: 2023 - RNA, 20 nt, Artificial Sequence
  LDLR targeting guide sequence portion
gcaacagaugaagacccuau

SEQ ID NO: 2024 - RNA, 20 nt, Artificial Sequence
  LDLR targeting guide sequence portion
gcaacaguaacacggcgauu

SEQ ID NO: 2025 - RNA, 20 nt, Artificial Sequence
  LDLR targeting guide sequence portion
gcaaccaggguuugcaaaaa

SEQ ID NO: 2026 - RNA, 20 nt, Artificial Sequence
  LDLR targeting guide sequence portion
gcaacgcuuuuugggagaau

SEQ ID NO: 2027 - RNA, 20 nt, Artificial Sequence
  LDLR targeting guide sequence portion
gcaagccuugcuagacagcc

SEQ ID NO: 2028 - RNA, 20 nt, Artificial Sequence
  LDLR targeting guide sequence portion
gcaaggagaccacgggaaug

SEQ ID NO: 2029 - RNA, 20 nt, Artificial Sequence
  LDLR targeting guide sequence portion
gcaaggcuugcauagaagag

SEQ ID NO: 2030 - RNA, 20 nt, Artificial Sequence
  LDLR targeting guide sequence portion
gcaaguggcuuucaacacac

SEQ ID NO: 2031 - RNA, 20 nt, Artificial Sequence
  LDLR targeting guide sequence portion
gcaauaacccccuacacagg

SEQ ID NO: 2032 - RNA, 20 nt, Artificial Sequence
  LDLR targeting guide sequence portion
gcaaugcuuuggucuucucu

SEQ ID NO: 2033 - RNA, 20 nt, Artificial Sequence
  LDLR targeting guide sequence portion
gcaauggcuuggguugggau

SEQ ID NO: 2034 - RNA, 20 nt, Artificial Sequence
  LDLR targeting guide sequence portion
gcaauuguccccagggacaa

SEQ ID NO: 2035 - RNA, 20 nt, Artificial Sequence
  LDLR targeting guide sequence portion
gcacacaguccaguucgugc

SEQ ID NO: 2036 - RNA, 20 nt, Artificial Sequence
  LDLR targeting guide sequence portion
gcaccaacgggacccccugg

SEQ ID NO: 2037 - RNA, 20 nt, Artificial Sequence
  LDLR targeting guide sequence portion
gcaccaggcugguguccuga

SEQ ID NO: 2038 - RNA, 20 nt, Artificial Sequence
  LDLR targeting guide sequence portion
gcacccagguguggcuguca

SEQ ID NO: 2039 - RNA, 20 nt, Artificial Sequence
  LDLR targeting guide sequence portion
gcaccgagaccaaacucauu

SEQ ID NO: 2040 - RNA, 20 nt, Artificial Sequence
  LDLR targeting guide sequence portion
gcaccugugucuggccaaau

SEQ ID NO: 2041 - RNA, 20 nt, Artificial Sequence
  LDLR targeting guide sequence portion
gcacgaacuggacugugugc

SEQ ID NO: 2042 - RNA, 20 nt, Artificial Sequence
  LDLR targeting guide sequence portion
gcacggugaggccgggcgca

SEQ ID NO: 2043 - RNA, 20 nt, Artificial Sequence
  LDLR targeting guide sequence portion
gcacguaaaugcgucccugu

SEQ ID NO: 2044 - RNA, 20 nt, Artificial Sequence
  LDLR targeting guide sequence portion
gcacgugccaccguacccag

SEQ ID NO: 2045 - RNA, 20 nt, Artificial Sequence
  LDLR targeting guide sequence portion
gcacuaggugggcggacaua

SEQ ID NO: 2046 - RNA, 20 nt, Artificial Sequence
  LDLR targeting guide sequence portion
gcacugauguccggagagac

SEQ ID NO: 2047 - RNA, 20 nt, Artificial Sequence
  LDLR targeting guide sequence portion
gcacuguccgaagccuguuc

SEQ ID NO: 2048 - RNA, 20 nt, Artificial Sequence
  LDLR targeting guide sequence portion
gcacuguuuucugucgugug

SEQ ID NO: 2049 - RNA, 20 nt, Artificial Sequence
  LDLR targeting guide sequence portion
gcacuuaauaaauauuaagg

SEQ ID NO: 2050 - RNA, 20 nt, Artificial Sequence
  LDLR targeting guide sequence portion
gcacuuucucaguucagagu

SEQ ID NO: 2051 - RNA, 20 nt, Artificial Sequence
  LDLR targeting guide sequence portion
gcacuuugggaggcugagcu

SEQ ID NO: 2052 - RNA, 20 nt, Artificial Sequence
  LDLR targeting guide sequence portion
gcacuuuguauauugguuga

SEQ ID NO: 2053 - RNA, 20 nt, Artificial Sequence
  LDLR targeting guide sequence portion
gcagaacaggcuucggacag

SEQ ID NO: 2054 - RNA, 20 nt, Artificial Sequence
  LDLR targeting guide sequence portion
gcagagccugagucacuggu

SEQ ID NO: 2055 - RNA, 20 nt, Artificial Sequence
  LDLR targeting guide sequence portion
gcagauggcaccaacgggac

SEQ ID NO: 2056 - RNA, 20 nt, Artificial Sequence
  LDLR targeting guide sequence portion
gcagauguucacgccacguc

SEQ ID NO: 2057 - RNA, 20 nt, Artificial Sequence
  LDLR targeting guide sequence portion
gcagcccauggccucuggcc

SEQ ID NO: 2058 - RNA, 20 nt, Artificial Sequence
  LDLR targeting guide sequence portion
gcaggcaaugcuuuggucuu

SEQ ID NO: 2059 - RNA, 20 nt, Artificial Sequence
  LDLR targeting guide sequence portion
gcaggccacguguccucacg

SEQ ID NO: 2060 - RNA, 20 nt, Artificial Sequence
  LDLR targeting guide sequence portion
gcagggaaccgugauaagcc

SEQ ID NO: 2061 - RNA, 20 nt, Artificial Sequence
  LDLR targeting guide sequence portion
gcagggacgggacuccaggc

SEQ ID NO: 2062 - RNA, 20 nt, Artificial Sequence
  LDLR targeting guide sequence portion
gcagggccagggggucccgu

SEQ ID NO: 2063 - RNA, 20 nt, Artificial Sequence
  LDLR targeting guide sequence portion
gcagguugaccgggacuuca

SEQ ID NO: 2064 - RNA, 20 nt, Artificial Sequence
  LDLR targeting guide sequence portion
gcaguggcauaaucauagcu

SEQ ID NO: 2065 - RNA, 20 nt, Artificial Sequence
  LDLR targeting guide sequence portion
gcaguucucgauauucacga

SEQ ID NO: 2066 - RNA, 20 nt, Artificial Sequence
  LDLR targeting guide sequence portion
gcauagaagagguaaacacg

SEQ ID NO: 2067 - RNA, 20 nt, Artificial Sequence
  LDLR targeting guide sequence portion
gcauagaaguggaagcacua

SEQ ID NO: 2068 - RNA, 20 nt, Artificial Sequence
  LDLR targeting guide sequence portion
gcaucagcagcccauggccu

SEQ ID NO: 2069 - RNA, 20 nt, Artificial Sequence
  LDLR targeting guide sequence portion
gcaucauuuggugaaugagu

SEQ ID NO: 2070 - RNA, 20 nt, Artificial Sequence
  LDLR targeting guide sequence portion
gcauggcgaggcugaggugg

SEQ ID NO: 2071 - RNA, 20 nt, Artificial Sequence
  LDLR targeting guide sequence portion
gcaugggcacuguccgaagc

SEQ ID NO: 2072 - RNA, 20 nt, Artificial Sequence
  LDLR targeting guide sequence portion
gcauggugcaucagcagccc

SEQ ID NO: 2073 - RNA, 20 nt, Artificial Sequence
  LDLR targeting guide sequence portion
gcauguuuuaaacacauacc

SEQ ID NO: 2074 - RNA, 20 nt, Artificial Sequence
  LDLR targeting guide sequence portion
gcauucauugacacgggcuu

SEQ ID NO: 2075 - RNA, 20 nt, Artificial Sequence
  LDLR targeting guide sequence portion
gcauugccugccagagcuuu

SEQ ID NO: 2076 - RNA, 20 nt, Artificial Sequence
  LDLR targeting guide sequence portion
gcauuuacgugcuccgaaac

SEQ ID NO: 2077 - RNA, 20 nt, Artificial Sequence
  LDLR targeting guide sequence portion
gcauuucagaggcaauaacc

SEQ ID NO: 2078 - RNA, 20 nt, Artificial Sequence
  LDLR targeting guide sequence portion
gcauuugaggcugucgugag

SEQ ID NO: 2079 - RNA, 20 nt, Artificial Sequence
  LDLR targeting guide sequence portion
gcauuugcauagaaguggaa

SEQ ID NO: 2080 - RNA, 20 nt, Artificial Sequence
  LDLR targeting guide sequence portion
gcauuuguguuauuauuuug

SEQ ID NO: 2081 - RNA, 20 nt, Artificial Sequence
  LDLR targeting guide sequence portion
gccaaaccccuaaacucagg

SEQ ID NO: 2082 - RNA, 20 nt, Artificial Sequence
  LDLR targeting guide sequence portion
gccaaauguacacaguguac

SEQ ID NO: 2083 - RNA, 20 nt, Artificial Sequence
  LDLR targeting guide sequence portion
gccaaauucauuuuuuaaga

SEQ ID NO: 2084 - RNA, 20 nt, Artificial Sequence
  LDLR targeting guide sequence portion
gccaagguaaccgggugucu

SEQ ID NO: 2085 - RNA, 20 nt, Artificial Sequence
  LDLR targeting guide sequence portion
gccaaucccuugugacaucu

SEQ ID NO: 2086 - RNA, 20 nt, Artificial Sequence
  LDLR targeting guide sequence portion
gccacaccugggugcaggcc

SEQ ID NO: 2087 - RNA, 20 nt, Artificial Sequence
  LDLR targeting guide sequence portion
gccaccacggauucagccag

SEQ ID NO: 2088 - RNA, 20 nt, Artificial Sequence
  LDLR targeting guide sequence portion
gccaccguacccagcugauu

SEQ ID NO: 2089 - RNA, 20 nt, Artificial Sequence
  LDLR targeting guide sequence portion
gccacgucauccuccagacu

SEQ ID NO: 2090 - RNA, 20 nt, Artificial Sequence
  LDLR targeting guide sequence portion
gccacguguccucacggcca

SEQ ID NO: 2091 - RNA, 20 nt, Artificial Sequence
  LDLR targeting guide sequence portion
gccacucauacauacaacgg

SEQ ID NO: 2092 - RNA, 20 nt, Artificial Sequence
  LDLR targeting guide sequence portion
gccacugcgcccggccucac

SEQ ID NO: 2093 - RNA, 20 nt, Artificial Sequence
  LDLR targeting guide sequence portion
gccacuucccagaggcagag

SEQ ID NO: 2094 - RNA, 20 nt, Artificial Sequence
  LDLR targeting guide sequence portion
gccacuugcuucucugggcc

SEQ ID NO: 2095 - RNA, 20 nt, Artificial Sequence
  LDLR targeting guide sequence portion
gccagacacaggugccucac

SEQ ID NO: 2096 - RNA, 20 nt, Artificial Sequence
  LDLR targeting guide sequence portion
gccagaggccaugggcugcu

SEQ ID NO: 2097 - RNA, 20 nt, Artificial Sequence
  LDLR targeting guide sequence portion
gccagaucauuuccgacgcc

SEQ ID NO: 2098 - RNA, 20 nt, Artificial Sequence
  LDLR targeting guide sequence portion
gccaggaaagggauucaugg

SEQ ID NO: 2099 - RNA, 20 nt, Artificial Sequence
  LDLR targeting guide sequence portion
gccaggcauggcgaggcuga

SEQ ID NO: 2100 - RNA, 20 nt, Artificial Sequence
  LDLR targeting guide sequence portion
gccagggaaagcccguguca

SEQ ID NO: 2101 - RNA, 20 nt, Artificial Sequence
  LDLR targeting guide sequence portion
gccagggggucccguuggug

SEQ ID NO: 2102 - RNA, 20 nt, Artificial Sequence
  LDLR targeting guide sequence portion
gccagguuagccuuugcccu

SEQ ID NO: 2103 - RNA, 20 nt, Artificial Sequence
  LDLR targeting guide sequence portion
gccaucugcuguuguguguu

SEQ ID NO: 2104 - RNA, 20 nt, Artificial Sequence
  LDLR targeting guide sequence portion
gccaugaaucccuuuccugg

SEQ ID NO: 2105 - RNA, 20 nt, Artificial Sequence
  LDLR targeting guide sequence portion
gccaugccuggccagaggcc

SEQ ID NO: 2106 - RNA, 20 nt, Artificial Sequence
  LDLR targeting guide sequence portion
gccaugggcugcugaugcac

SEQ ID NO: 2107 - RNA, 20 nt, Artificial Sequence
  LDLR targeting guide sequence portion
gccauucacuuccccaaucu

SEQ ID NO: 2108 - RNA, 20 nt, Artificial Sequence
  LDLR targeting guide sequence portion
gccauugcaugggcacuguc

SEQ ID NO: 2109 - RNA, 20 nt, Artificial Sequence
  LDLR targeting guide sequence portion
gcccaccuagugcuuccacu

SEQ ID NO: 2110 - RNA, 20 nt, Artificial Sequence
  LDLR targeting guide sequence portion
gcccagaacccuuccugaga

SEQ ID NO: 2111 - RNA, 20 nt, Artificial Sequence
  LDLR targeting guide sequence portion
gcccagagaagcaaguggcu

SEQ ID NO: 2112 - RNA, 20 nt, Artificial Sequence
  LDLR targeting guide sequence portion
gcccaggcuggaaagcagug

SEQ ID NO: 2113 - RNA, 20 nt, Artificial Sequence
  LDLR targeting guide sequence portion
gcccaugcaauggcuugggu

SEQ ID NO: 2114 - RNA, 20 nt, Artificial Sequence
  LDLR targeting guide sequence portion
gcccauggccucuggccagg

SEQ ID NO: 2115 - RNA, 20 nt, Artificial Sequence
  LDLR targeting guide sequence portion
gccccgagaauagucacuga

SEQ ID NO: 2116 - RNA, 20 nt, Artificial Sequence
  LDLR targeting guide sequence portion
gccccucucuguccccggca

SEQ ID NO: 2117 - RNA, 20 nt, Artificial Sequence
  LDLR targeting guide sequence portion
gcccggccucaccgugcaug

SEQ ID NO: 2118 - RNA, 20 nt, Artificial Sequence
  LDLR targeting guide sequence portion
gcccggggggaccaggauga

SEQ ID NO: 2119 - RNA, 20 nt, Artificial Sequence
  LDLR targeting guide sequence portion
gcccgugucaaugaaugccg

SEQ ID NO: 2120 - RNA, 20 nt, Artificial Sequence
  LDLR targeting guide sequence portion
gcccugccucauccaccaau

SEQ ID NO: 2121 - RNA, 20 nt, Artificial Sequence
  LDLR targeting guide sequence portion
gcccugucacccccgaauca

SEQ ID NO: 2122 - RNA, 20 nt, Artificial Sequence
  LDLR targeting guide sequence portion
gcccuguguaggggguuauu

SEQ ID NO: 2123 - RNA, 20 nt, Artificial Sequence
  LDLR targeting guide sequence portion
gccggccuuguuuuauucaa

SEQ ID NO: 2124 - RNA, 20 nt, Artificial Sequence
  LDLR targeting guide sequence portion
gccggcgaggucucaggaag

SEQ ID NO: 2125 - RNA, 20 nt, Artificial Sequence
  LDLR targeting guide sequence portion
gccggggacagagaggggca

SEQ ID NO: 2126 - RNA, 20 nt, Artificial Sequence
  LDLR targeting guide sequence portion
gccgugaggacacguggccu

SEQ ID NO: 2127 - RNA, 20 nt, Artificial Sequence
  LDLR targeting guide sequence portion
gccgugaucgugaauaucga

SEQ ID NO: 2128 - RNA, 20 nt, Artificial Sequence
  LDLR targeting guide sequence portion
gccguguuacuguugcacug

SEQ ID NO: 2129 - RNA, 20 nt, Artificial Sequence
  LDLR targeting guide sequence portion
gccucaaaugccugagcuca

SEQ ID NO: 2130 - RNA, 20 nt, Artificial Sequence
  LDLR targeting guide sequence portion
gccucauccaccaaucucua

SEQ ID NO: 2131 - RNA, 20 nt, Artificial Sequence
  LDLR targeting guide sequence portion
gccuccaagccauucacuuc

SEQ ID NO: 2132 - RNA, 20 nt, Artificial Sequence
  LDLR targeting guide sequence portion
gccucccagaugaauaaaua

SEQ ID NO: 2133 - RNA, 20 nt, Artificial Sequence
  LDLR targeting guide sequence portion
gccuccgucagacucccgcg

SEQ ID NO: 2134 - RNA, 20 nt, Artificial Sequence
  LDLR targeting guide sequence portion
gccucgccaugccuggccag

SEQ ID NO: 2135 - RNA, 20 nt, Artificial Sequence
  LDLR targeting guide sequence portion
gccucugaaaugccucuucu

SEQ ID NO: 2136 - RNA, 20 nt, Artificial Sequence
  LDLR targeting guide sequence portion
gccucuggccaggcauggcg

SEQ ID NO: 2137 - RNA, 20 nt, Artificial Sequence
  LDLR targeting guide sequence portion
gccucugggaaguggcauca

SEQ ID NO: 2138 - RNA, 20 nt, Artificial Sequence
  LDLR targeting guide sequence portion
gccucuucuuuauguacaaa

SEQ ID NO: 2139 - RNA, 20 nt, Artificial Sequence
  LDLR targeting guide sequence portion
gccugaaugucuuacuguga

SEQ ID NO: 2140 - RNA, 20 nt, Artificial Sequence
  LDLR targeting guide sequence portion
gccugacauccccuccccuu

SEQ ID NO: 2141 - RNA, 20 nt, Artificial Sequence
  LDLR targeting guide sequence portion
gccugagcaacaaagcgaga

SEQ ID NO: 2142 - RNA, 20 nt, Artificial Sequence
  LDLR targeting guide sequence portion
gccugagcucaaaccauccu

SEQ ID NO: 2143 - RNA, 20 nt, Artificial Sequence
  LDLR targeting guide sequence portion
gccugagucacuggucaccc

SEQ ID NO: 2144 - RNA, 20 nt, Artificial Sequence
  LDLR targeting guide sequence portion
gccugcacccagguguggcu

SEQ ID NO: 2145 - RNA, 20 nt, Artificial Sequence
  LDLR targeting guide sequence portion
gccugccagagcuuuguuuu

SEQ ID NO: 2146 - RNA, 20 nt, Artificial Sequence
  LDLR targeting guide sequence portion
gccuggagucccgucccugc

SEQ ID NO: 2147 - RNA, 20 nt, Artificial Sequence
  LDLR targeting guide sequence portion
gccuggccagaggccauggg

SEQ ID NO: 2148 - RNA, 20 nt, Artificial Sequence
  LDLR targeting guide sequence portion
gccugggaucccaucccaac

SEQ ID NO: 2149 - RNA, 20 nt, Artificial Sequence
  LDLR targeting guide sequence portion
gccuggugcccauccucccg

SEQ ID NO: 2150 - RNA, 20 nt, Artificial Sequence
  LDLR targeting guide sequence portion
gccuguucugccucccagau

SEQ ID NO: 2151 - RNA, 20 nt, Artificial Sequence
  LDLR targeting guide sequence portion
gccuguuucucuuauccuuc

SEQ ID NO: 2152 - RNA, 20 nt, Artificial Sequence
  LDLR targeting guide sequence portion
gccuugcuagacagccaggu

SEQ ID NO: 2153 - RNA, 20 nt, Artificial Sequence
  LDLR targeting guide sequence portion
gccuuguuuuauucaaagac

SEQ ID NO: 2154 - RNA, 20 nt, Artificial Sequence
  LDLR targeting guide sequence portion
gccuuucugguuucggagca

SEQ ID NO: 2155 - RNA, 20 nt, Artificial Sequence
  LDLR targeting guide sequence portion
gccuuugcccugucaccccc

SEQ ID NO: 2156 - RNA, 20 nt, Artificial Sequence
  LDLR targeting guide sequence portion
gcgagaucccaucucuacaa

SEQ ID NO: 2157 - RNA, 20 nt, Artificial Sequence
  LDLR targeting guide sequence portion
gcgaggucucaggaaggguu

SEQ ID NO: 2158 - RNA, 20 nt, Artificial Sequence
  LDLR targeting guide sequence portion
gcgauuucagaaagaaccug

SEQ ID NO: 2159 - RNA, 20 nt, Artificial Sequence
  LDLR targeting guide sequence portion
gcgcccggccucaccgugca

SEQ ID NO: 2160 - RNA, 20 nt, Artificial Sequence
  LDLR targeting guide sequence portion
gcggacauaaagacgacaau

SEQ ID NO: 2161 - RNA, 20 nt, Artificial Sequence
  LDLR targeting guide sequence portion
gcgggagucugacggaggcu

SEQ ID NO: 2162 - RNA, 20 nt, Artificial Sequence
  LDLR targeting guide sequence portion
gcgucccuguacagauagug

SEQ ID NO: 2163 - RNA, 20 nt, Artificial Sequence
  LDLR targeting guide sequence portion
gcgucggaaaugaucuggcu

SEQ ID NO: 2164 - RNA, 20 nt, Artificial Sequence
  LDLR targeting guide sequence portion
gcgugaacaucugccuggag

SEQ ID NO: 2165 - RNA, 20 nt, Artificial Sequence
  LDLR targeting guide sequence portion
gcgugaagaugucacaaggg

SEQ ID NO: 2166 - RNA, 20 nt, Artificial Sequence
  LDLR targeting guide sequence portion
gcgugaggcaccugugucug

SEQ ID NO: 2167 - RNA, 20 nt, Artificial Sequence
  LDLR targeting guide sequence portion
gcguugcacacaguccaguu

SEQ ID NO: 2168 - RNA, 20 nt, Artificial Sequence
  LDLR targeting guide sequence portion
gcuaaccuggcugucuagca

SEQ ID NO: 2169 - RNA, 20 nt, Artificial Sequence
  LDLR targeting guide sequence portion
gcuacaaaaaccuucuauac

SEQ ID NO: 2170 - RNA, 20 nt, Artificial Sequence
  LDLR targeting guide sequence portion
gcuagacagccagguuagcc

SEQ ID NO: 2171 - RNA, 20 nt, Artificial Sequence
  LDLR targeting guide sequence portion
gcuaugauuaugccacugcu

SEQ ID NO: 2172 - RNA, 20 nt, Artificial Sequence
  LDLR targeting guide sequence portion
gcucacgacagccucaaaug

SEQ ID NO: 2173 - RNA, 20 nt, Artificial Sequence
  LDLR targeting guide sequence portion
gcucaggcauuugaggcugu

SEQ ID NO: 2174 - RNA, 20 nt, Artificial Sequence
  LDLR targeting guide sequence portion
gcucaggccuggucuccaac

SEQ ID NO: 2175 - RNA, 20 nt, Artificial Sequence
  LDLR targeting guide sequence portion
gcucugccucugggaagugg

SEQ ID NO: 2176 - RNA, 20 nt, Artificial Sequence
  LDLR targeting guide sequence portion
gcucuggcaggcaaugcuuu

SEQ ID NO: 2177 - RNA, 20 nt, Artificial Sequence
  LDLR targeting guide sequence portion
gcugaauccgugguggcacc

SEQ ID NO: 2178 - RNA, 20 nt, Artificial Sequence
  LDLR targeting guide sequence portion
gcugagcuggaucacuugag

SEQ ID NO: 2179 - RNA, 20 nt, Artificial Sequence
  LDLR targeting guide sequence portion
gcugcugaugcaccaugcau

SEQ ID NO: 2180 - RNA, 20 nt, Artificial Sequence
  LDLR targeting guide sequence portion
gcuggaaagcaguggcauaa

SEQ ID NO: 2181 - RNA, 20 nt, Artificial Sequence
  LDLR targeting guide sequence portion
gcuggaucacuugaguucag

SEQ ID NO: 2182 - RNA, 20 nt, Artificial Sequence
  LDLR targeting guide sequence portion
gcuggguacgguggcacgug

SEQ ID NO: 2183 - RNA, 20 nt, Artificial Sequence
  LDLR targeting guide sequence portion
gcugguguccugacagccac

SEQ ID NO: 2184 - RNA, 20 nt, Artificial Sequence
  LDLR targeting guide sequence portion
gcuguauuuguucagugacu

SEQ ID NO: 2185 - RNA, 20 nt, Artificial Sequence
  LDLR targeting guide sequence portion
gcugucacugucucuccgga

SEQ ID NO: 2186 - RNA, 20 nt, Artificial Sequence
  LDLR targeting guide sequence portion
gcugucaggacaccagccug

SEQ ID NO: 2187 - RNA, 20 nt, Artificial Sequence
  LDLR targeting guide sequence portion
gcugucuagcaaggcuugca

SEQ ID NO: 2188 - RNA, 20 nt, Artificial Sequence
  LDLR targeting guide sequence portion
gcuguuguguguugaaagcc

SEQ ID NO: 2189 - RNA, 20 nt, Artificial Sequence
  LDLR targeting guide sequence portion
gcuuaaggaagguacaaacc

SEQ ID NO: 2190 - RNA, 20 nt, Artificial Sequence
  LDLR targeting guide sequence portion
gcuuagagauugguggauga

SEQ ID NO: 2191 - RNA, 20 nt, Artificial Sequence
  LDLR targeting guide sequence portion
gcuuaucacgguucccugca

SEQ ID NO: 2192 - RNA, 20 nt, Artificial Sequence
  LDLR targeting guide sequence portion
gcuuccacuucuaugcaaau

SEQ ID NO: 2193 - RNA, 20 nt, Artificial Sequence
  LDLR targeting guide sequence portion
gcuucggacagugcccaugc

SEQ ID NO: 2194 - RNA, 20 nt, Artificial Sequence
  LDLR targeting guide sequence portion
gcuucucugggccugacauc

SEQ ID NO: 2195 - RNA, 20 nt, Artificial Sequence
  LDLR targeting guide sequence portion
gcuucugggagauggguguc

SEQ ID NO: 2196 - RNA, 20 nt, Artificial Sequence
  LDLR targeting guide sequence portion
gcuugcauagaagagguaaa

SEQ ID NO: 2197 - RNA, 20 nt, Artificial Sequence
  LDLR targeting guide sequence portion
gcuuggaggcauuugcauag

SEQ ID NO: 2198 - RNA, 20 nt, Artificial Sequence
  LDLR targeting guide sequence portion
gcuuggguugggauuuuggu

SEQ ID NO: 2199 - RNA, 20 nt, Artificial Sequence
  LDLR targeting guide sequence portion
gcuuucaacacacaacagca

SEQ ID NO: 2200 - RNA, 20 nt, Artificial Sequence
  LDLR targeting guide sequence portion
gcuuuccagccugggcaaca

SEQ ID NO: 2201 - RNA, 20 nt, Artificial Sequence
  LDLR targeting guide sequence portion
gcuuucccuggccugggauc

SEQ ID NO: 2202 - RNA, 20 nt, Artificial Sequence
  LDLR targeting guide sequence portion
gcuuugaagucccggucaac

SEQ ID NO: 2203 - RNA, 20 nt, Artificial Sequence
  LDLR targeting guide sequence portion
gcuuuggucuucucugucuu

SEQ ID NO: 2204 - RNA, 20 nt, Artificial Sequence
  LDLR targeting guide sequence portion
gcuuuguugcucaggccugg

SEQ ID NO: 2205 - RNA, 20 nt, Artificial Sequence
  LDLR targeting guide sequence portion
gcuuuuugggagaaugaugu

SEQ ID NO: 2206 - RNA, 20 nt, Artificial Sequence
  LDLR targeting guide sequence portion
ggaaagcaguggcauaauca

SEQ ID NO: 2207 - RNA, 20 nt, Artificial Sequence
  LDLR targeting guide sequence portion
ggaaagcccgugucaaugaa

SEQ ID NO: 2208 - RNA, 20 nt, Artificial Sequence
  LDLR targeting guide sequence portion
ggaaaggaagaaaccaaaau

SEQ ID NO: 2209 - RNA, 20 nt, Artificial Sequence
  LDLR targeting guide sequence portion
ggaaagggauucauggcguc

SEQ ID NO: 2210 - RNA, 20 nt, Artificial Sequence
  LDLR targeting guide sequence portion
ggaaaugaucuggcugaauc

SEQ ID NO: 2211 - RNA, 20 nt, Artificial Sequence
  LDLR targeting guide sequence portion
ggaaccgugauaagccuuuc

SEQ ID NO: 2212 - RNA, 20 nt, Artificial Sequence
  LDLR targeting guide sequence portion
ggaagaaaccaaaaucccaa

SEQ ID NO: 2213 - RNA, 20 nt, Artificial Sequence
  LDLR targeting guide sequence portion
ggaagaugaaaggggagggg

SEQ ID NO: 2214 - RNA, 20 nt, Artificial Sequence
  LDLR targeting guide sequence portion
ggaagcacuaggugggcgga

SEQ ID NO: 2215 - RNA, 20 nt, Artificial Sequence
  LDLR targeting guide sequence portion
ggaaggguucugggcaggga

SEQ ID NO: 2216 - RNA, 20 nt, Artificial Sequence
  LDLR targeting guide sequence portion
ggaagguacaaacccaccuc

SEQ ID NO: 2217 - RNA, 20 nt, Artificial Sequence
  LDLR targeting guide sequence portion
ggaagugaauggcuuggagg

SEQ ID NO: 2218 - RNA, 20 nt, Artificial Sequence
  LDLR targeting guide sequence portion
ggaaguggcaucauuuggug

SEQ ID NO: 2219 - RNA, 20 nt, Artificial Sequence
  LDLR targeting guide sequence portion
ggaaguggguaggggucggg

SEQ ID NO: 2220 - RNA, 20 nt, Artificial Sequence
  LDLR targeting guide sequence portion
ggaaguuuugaguuucucuc

SEQ ID NO: 2221 - RNA, 20 nt, Artificial Sequence
  LDLR targeting guide sequence portion
ggaauggaaguggguagggg

SEQ ID NO: 2222 - RNA, 20 nt, Artificial Sequence
  LDLR targeting guide sequence portion
ggacaauugccaaucccuug

SEQ ID NO: 2223 - RNA, 20 nt, Artificial Sequence
  LDLR targeting guide sequence portion
ggacacaguguuuugucccu

SEQ ID NO: 2224 - RNA, 20 nt, Artificial Sequence
  LDLR targeting guide sequence portion
ggacaccagccuggugccca

SEQ ID NO: 2225 - RNA, 20 nt, Artificial Sequence
  LDLR targeting guide sequence portion
ggacagagaggggcagguug

SEQ ID NO: 2226 - RNA, 20 nt, Artificial Sequence
  LDLR targeting guide sequence portion
ggacagugcccaugcaaugg

SEQ ID NO: 2227 - RNA, 20 nt, Artificial Sequence
  LDLR targeting guide sequence portion
ggacauaaagacgacaaugg

SEQ ID NO: 2228 - RNA, 20 nt, Artificial Sequence
  LDLR targeting guide sequence portion
ggacaucagugcaacaguaa

SEQ ID NO: 2229 - RNA, 20 nt, Artificial Sequence
  LDLR targeting guide sequence portion
ggacaucauucucccaaaaa

SEQ ID NO: 2230 - RNA, 20 nt, Artificial Sequence
  LDLR targeting guide sequence portion
ggaccaggaugacaccucca

SEQ ID NO: 2231 - RNA, 20 nt, Artificial Sequence
  LDLR targeting guide sequence portion
ggacccccuggcccugccuc

SEQ ID NO: 2232 - RNA, 20 nt, Artificial Sequence
  LDLR targeting guide sequence portion
ggacgcauuuacgugcuccg

SEQ ID NO: 2233 - RNA, 20 nt, Artificial Sequence
  LDLR targeting guide sequence portion
ggacgggacuccaggcagau

SEQ ID NO: 2234 - RNA, 20 nt, Artificial Sequence
  LDLR targeting guide sequence portion
ggacuccaggcagauguuca

SEQ ID NO: 2235 - RNA, 20 nt, Artificial Sequence
  LDLR targeting guide sequence portion
ggacugugugcaacgcuuuu

SEQ ID NO: 2236 - RNA, 20 nt, Artificial Sequence
  LDLR targeting guide sequence portion
ggacuucaaagccgugaucg

SEQ ID NO: 2237 - RNA, 20 nt, Artificial Sequence
  LDLR targeting guide sequence portion
ggacuucagguucuuucuga

SEQ ID NO: 2238 - RNA, 20 nt, Artificial Sequence
  LDLR targeting guide sequence portion
ggagaaugauguccccguug

SEQ ID NO: 2239 - RNA, 20 nt, Artificial Sequence
  LDLR targeting guide sequence portion
ggagaccacgggaauggaag

SEQ ID NO: 2240 - RNA, 20 nt, Artificial Sequence
  LDLR targeting guide sequence portion
ggagaccaggccugagcaac

SEQ ID NO: 2241 - RNA, 20 nt, Artificial Sequence
  LDLR targeting guide sequence portion
ggagagaaacucaaaacuuc

SEQ ID NO: 2242 - RNA, 20 nt, Artificial Sequence
  LDLR targeting guide sequence portion
ggagagaaauggagguguca

SEQ ID NO: 2243 - RNA, 20 nt, Artificial Sequence
  LDLR targeting guide sequence portion
ggagagacagugacagccuc

SEQ ID NO: 2244 - RNA, 20 nt, Artificial Sequence
  LDLR targeting guide sequence portion
ggagaugggugucacuuuuu

SEQ ID NO: 2245 - RNA, 20 nt, Artificial Sequence
  LDLR targeting guide sequence portion
ggagcacguaaaugcguccc

SEQ ID NO: 2246 - RNA, 20 nt, Artificial Sequence
  LDLR targeting guide sequence portion
ggaggaugacguggcgugaa

SEQ ID NO: 2247 - RNA, 20 nt, Artificial Sequence
  LDLR targeting guide sequence portion
ggaggaugggcaccaggcug

SEQ ID NO: 2248 - RNA, 20 nt, Artificial Sequence
  LDLR targeting guide sequence portion
ggaggaugguuugagcucag

SEQ ID NO: 2249 - RNA, 20 nt, Artificial Sequence
  LDLR targeting guide sequence portion
ggaggcagaacaggcuucgg

SEQ ID NO: 2250 - RNA, 20 nt, Artificial Sequence
  LDLR targeting guide sequence portion
ggaggcauuugcauagaagu

SEQ ID NO: 2251 - RNA, 20 nt, Artificial Sequence
  LDLR targeting guide sequence portion
ggaggcugagcuggaucacu

SEQ ID NO: 2252 - RNA, 20 nt, Artificial Sequence
  LDLR targeting guide sequence portion
ggaggcugucacugucucuc

SEQ ID NO: 2253 - RNA, 20 nt, Artificial Sequence
  LDLR targeting guide sequence portion
ggaggggaugucaggcccag

SEQ ID NO: 2254 - RNA, 20 nt, Artificial Sequence
  LDLR targeting guide sequence portion
ggaggugucauccugguccc

SEQ ID NO: 2255 - RNA, 20 nt, Artificial Sequence
  LDLR targeting guide sequence portion
ggagucaacguguuuaccuc

SEQ ID NO: 2256 - RNA, 20 nt, Artificial Sequence
  LDLR targeting guide sequence portion
ggagucccgucccugcccag

SEQ ID NO: 2257 - RNA, 20 nt, Artificial Sequence
  LDLR targeting guide sequence portion
ggagucugacggaggcuguc

SEQ ID NO: 2258 - RNA, 20 nt, Artificial Sequence
  LDLR targeting guide sequence portion
ggaguuggagaccaggccug

SEQ ID NO: 2259 - RNA, 20 nt, Artificial Sequence
  LDLR targeting guide sequence portion
ggauaagagaaacaggcccg

SEQ ID NO: 2260 - RNA, 20 nt, Artificial Sequence
  LDLR targeting guide sequence portion
ggaucccaggccagggaaag

SEQ ID NO: 2261 - RNA, 20 nt, Artificial Sequence
  LDLR targeting guide sequence portion
ggaucccaucccaacacaca

SEQ ID NO: 2262 - RNA, 20 nt, Artificial Sequence
  LDLR targeting guide sequence portion
ggaucguuugacgggacuuc

SEQ ID NO: 2263 - RNA, 20 nt, Artificial Sequence
  LDLR targeting guide sequence portion
ggaucucgcuuuguugcuca

SEQ ID NO: 2264 - RNA, 20 nt, Artificial Sequence
  LDLR targeting guide sequence portion
ggaugacaccuccauuucuc

SEQ ID NO: 2265 - RNA, 20 nt, Artificial Sequence
  LDLR targeting guide sequence portion
ggaugacguggcgugaacau

SEQ ID NO: 2266 - RNA, 20 nt, Artificial Sequence
  LDLR targeting guide sequence portion
ggaugaggcagggccagggg

SEQ ID NO: 2267 - RNA, 20 nt, Artificial Sequence
  LDLR targeting guide sequence portion
ggaugggaucccaggccagg

SEQ ID NO: 2268 - RNA, 20 nt, Artificial Sequence
  LDLR targeting guide sequence portion
ggaugggcaccaggcuggug

SEQ ID NO: 2269 - RNA, 20 nt, Artificial Sequence
  LDLR targeting guide sequence portion
ggaugguuugagcucaggca

SEQ ID NO: 2270 - RNA, 20 nt, Artificial Sequence
  LDLR targeting guide sequence portion
ggaugucaggcccagagaag

SEQ ID NO: 2271 - RNA, 20 nt, Artificial Sequence
  LDLR targeting guide sequence portion
ggauucagccagaucauuuc

SEQ ID NO: 2272 - RNA, 20 nt, Artificial Sequence
  LDLR targeting guide sequence portion
ggauucauggcgucggaaau

SEQ ID NO: 2273 - RNA, 20 nt, Artificial Sequence
  LDLR targeting guide sequence portion
ggauuggcaauuguccccag

SEQ ID NO: 2274 - RNA, 20 nt, Artificial Sequence
  LDLR targeting guide sequence portion
ggauugugucacgguggaga

SEQ ID NO: 2275 - RNA, 20 nt, Artificial Sequence
  LDLR targeting guide sequence portion
ggauuuugguuucuuccuuu

SEQ ID NO: 2276 - RNA, 20 nt, Artificial Sequence
  LDLR targeting guide sequence portion
ggauuuuuuguuauguuugc

SEQ ID NO: 2277 - RNA, 20 nt, Artificial Sequence
  LDLR targeting guide sequence portion
ggcaaaggcuaaccuggcug

SEQ ID NO: 2278 - RNA, 20 nt, Artificial Sequence
  LDLR targeting guide sequence portion
ggcaacagaugaagacccua

SEQ ID NO: 2279 - RNA, 20 nt, Artificial Sequence
  LDLR targeting guide sequence portion
ggcaauaacccccuacacag

SEQ ID NO: 2280 - RNA, 20 nt, Artificial Sequence
  LDLR targeting guide sequence portion
ggcaaugcuuuggucuucuc

SEQ ID NO: 2281 - RNA, 20 nt, Artificial Sequence
  LDLR targeting guide sequence portion
ggcaauuguccccagggaca

SEQ ID NO: 2282 - RNA, 20 nt, Artificial Sequence
  LDLR targeting guide sequence portion
ggcaccaacgggacccccug

SEQ ID NO: 2283 - RNA, 20 nt, Artificial Sequence
  LDLR targeting guide sequence portion
ggcaccaggcugguguccug

SEQ ID NO: 2284 - RNA, 20 nt, Artificial Sequence
  LDLR targeting guide sequence portion
ggcaccgagaccaaacucau

SEQ ID NO: 2285 - RNA, 20 nt, Artificial Sequence
  LDLR targeting guide sequence portion
ggcaccugugucuggccaaa

SEQ ID NO: 2286 - RNA, 20 nt, Artificial Sequence
  LDLR targeting guide sequence portion
ggcacgugccaccguaccca

SEQ ID NO: 2287 - RNA, 20 nt, Artificial Sequence
  LDLR targeting guide sequence portion
ggcacuuaauaaauauuaag

SEQ ID NO: 2288 - RNA, 20 nt, Artificial Sequence
  LDLR targeting guide sequence portion
ggcagaacaggcuucggaca

SEQ ID NO: 2289 - RNA, 20 nt, Artificial Sequence
  LDLR targeting guide sequence portion
ggcagagccugagucacugg

SEQ ID NO: 2290 - RNA, 20 nt, Artificial Sequence
  LDLR targeting guide sequence portion
ggcagauguucacgccacgu

SEQ ID NO: 2291 - RNA, 20 nt, Artificial Sequence
  LDLR targeting guide sequence portion
ggcaggcaaugcuuuggucu

SEQ ID NO: 2292 - RNA, 20 nt, Artificial Sequence
  LDLR targeting guide sequence portion
ggcagggacgggacuccagg

SEQ ID NO: 2293 - RNA, 20 nt, Artificial Sequence
  LDLR targeting guide sequence portion
ggcagggccagggggucccg

SEQ ID NO: 2294 - RNA, 20 nt, Artificial Sequence
  LDLR targeting guide sequence portion
ggcagguugaccgggacuuc

SEQ ID NO: 2295 - RNA, 20 nt, Artificial Sequence
  LDLR targeting guide sequence portion
ggcaguucucgauauucacg

SEQ ID NO: 2296 - RNA, 20 nt, Artificial Sequence
  LDLR targeting guide sequence portion
ggcaucauuuggugaaugag

SEQ ID NO: 2297 - RNA, 20 nt, Artificial Sequence
  LDLR targeting guide sequence portion
ggcauggcgaggcugaggug

SEQ ID NO: 2298 - RNA, 20 nt, Artificial Sequence
  LDLR targeting guide sequence portion
ggcauucauugacacgggcu

SEQ ID NO: 2299 - RNA, 20 nt, Artificial Sequence
  LDLR targeting guide sequence portion
ggcauuucagaggcaauaac

SEQ ID NO: 2300 - RNA, 20 nt, Artificial Sequence
  LDLR targeting guide sequence portion
ggcauuugaggcugucguga

SEQ ID NO: 2301 - RNA, 20 nt, Artificial Sequence
  LDLR targeting guide sequence portion
ggcauuugcauagaagugga

SEQ ID NO: 2302 - RNA, 20 nt, Artificial Sequence
  LDLR targeting guide sequence portion
ggccaaauucauuuuuuaag

SEQ ID NO: 2303 - RNA, 20 nt, Artificial Sequence
  LDLR targeting guide sequence portion
ggccaagguaaccggguguc

SEQ ID NO: 2304 - RNA, 20 nt, Artificial Sequence
  LDLR targeting guide sequence portion
ggccacguguccucacggcc

SEQ ID NO: 2305 - RNA, 20 nt, Artificial Sequence
  LDLR targeting guide sequence portion
ggccagacacaggugccuca

SEQ ID NO: 2306 - RNA, 20 nt, Artificial Sequence
  LDLR targeting guide sequence portion
ggccagaggccaugggcugc

SEQ ID NO: 2307 - RNA, 20 nt, Artificial Sequence
  LDLR targeting guide sequence portion
ggccaggcauggcgaggcug

SEQ ID NO: 2308 - RNA, 20 nt, Artificial Sequence
  LDLR targeting guide sequence portion
ggccagggaaagcccguguc

SEQ ID NO: 2309 - RNA, 20 nt, Artificial Sequence
  LDLR targeting guide sequence portion
ggccagggggucccguuggu

SEQ ID NO: 2310 - RNA, 20 nt, Artificial Sequence
  LDLR targeting guide sequence portion
ggccaugggcugcugaugca

SEQ ID NO: 2311 - RNA, 20 nt, Artificial Sequence
  LDLR targeting guide sequence portion
ggcccagagaagcaaguggc

SEQ ID NO: 2312 - RNA, 20 nt, Artificial Sequence
  LDLR targeting guide sequence portion
ggccccgagaauagucacug

SEQ ID NO: 2313 - RNA, 20 nt, Artificial Sequence
  LDLR targeting guide sequence portion
ggcccggggggaccaggaug

SEQ ID NO: 2314 - RNA, 20 nt, Artificial Sequence
  LDLR targeting guide sequence portion
ggcccugccucauccaccaa

SEQ ID NO: 2315 - RNA, 20 nt, Artificial Sequence
  LDLR targeting guide sequence portion
ggcccuguguaggggguuau

SEQ ID NO: 2316 - RNA, 20 nt, Artificial Sequence
  LDLR targeting guide sequence portion
ggccggcgaggucucaggaa

SEQ ID NO: 2317 - RNA, 20 nt, Artificial Sequence
  LDLR targeting guide sequence portion
ggccgugaggacacguggcc

SEQ ID NO: 2318 - RNA, 20 nt, Artificial Sequence
  LDLR targeting guide sequence portion
ggccucaccgugcauguuuu

SEQ ID NO: 2319 - RNA, 20 nt, Artificial Sequence
  LDLR targeting guide sequence portion
ggccucuggccaggcauggc

SEQ ID NO: 2320 - RNA, 20 nt, Artificial Sequence
  LDLR targeting guide sequence portion
ggccugacauccccuccccu

SEQ ID NO: 2321 - RNA, 20 nt, Artificial Sequence
  LDLR targeting guide sequence portion
ggccugagcaacaaagcgag

SEQ ID NO: 2322 - RNA, 20 nt, Artificial Sequence
  LDLR targeting guide sequence portion
ggccugcacccagguguggc

SEQ ID NO: 2323 - RNA, 20 nt, Artificial Sequence
  LDLR targeting guide sequence portion
ggccugggaucccaucccaa

SEQ ID NO: 2324 - RNA, 20 nt, Artificial Sequence
  LDLR targeting guide sequence portion
ggccuggucuccaacuccug

SEQ ID NO: 2325 - RNA, 20 nt, Artificial Sequence
  LDLR targeting guide sequence portion
ggccuguuucucuuauccuu

SEQ ID NO: 2326 - RNA, 20 nt, Artificial Sequence
  LDLR targeting guide sequence portion
ggccuuguuuuauucaaaga

SEQ ID NO: 2327 - RNA, 20 nt, Artificial Sequence
  LDLR targeting guide sequence portion
ggcgaggcugaggugggagg

SEQ ID NO: 2328 - RNA, 20 nt, Artificial Sequence
  LDLR targeting guide sequence portion
ggcgaggucucaggaagggu

SEQ ID NO: 2329 - RNA, 20 nt, Artificial Sequence
  LDLR targeting guide sequence portion
ggcgauuucagaaagaaccu

SEQ ID NO: 2330 - RNA, 20 nt, Artificial Sequence
  LDLR targeting guide sequence portion
ggcggacauaaagacgacaa

SEQ ID NO: 2331 - RNA, 20 nt, Artificial Sequence
  LDLR targeting guide sequence portion
ggcgucggaaaugaucuggc

SEQ ID NO: 2332 - RNA, 20 nt, Artificial Sequence
  LDLR targeting guide sequence portion
ggcgugaacaucugccugga

SEQ ID NO: 2333 - RNA, 20 nt, Artificial Sequence
  LDLR targeting guide sequence portion
ggcgugaggcaccugugucu

SEQ ID NO: 2334 - RNA, 20 nt, Artificial Sequence
  LDLR targeting guide sequence portion
ggcuaaccuggcugucuagc

SEQ ID NO: 2335 - RNA, 20 nt, Artificial Sequence
  LDLR targeting guide sequence portion
ggcuacaaaaaccuucuaua

SEQ ID NO: 2336 - RNA, 20 nt, Artificial Sequence
  LDLR targeting guide sequence portion
ggcucugccucugggaagug

SEQ ID NO: 2337 - RNA, 20 nt, Artificial Sequence
  LDLR targeting guide sequence portion
ggcugaauccgugguggcac

SEQ ID NO: 2338 - RNA, 20 nt, Artificial Sequence
  LDLR targeting guide sequence portion
ggcugagcuggaucacuuga

SEQ ID NO: 2339 - RNA, 20 nt, Artificial Sequence
  LDLR targeting guide sequence portion
ggcugcugaugcaccaugca

SEQ ID NO: 2340 - RNA, 20 nt, Artificial Sequence
  LDLR targeting guide sequence portion
ggcuggaaagcaguggcaua

SEQ ID NO: 2341 - RNA, 20 nt, Artificial Sequence
  LDLR targeting guide sequence portion
ggcugguguccugacagcca

SEQ ID NO: 2342 - RNA, 20 nt, Artificial Sequence
  LDLR targeting guide sequence portion
ggcugucacugucucuccgg

SEQ ID NO: 2343 - RNA, 20 nt, Artificial Sequence
  LDLR targeting guide sequence portion
ggcugucaggacaccagccu

SEQ ID NO: 2344 - RNA, 20 nt, Artificial Sequence
  LDLR targeting guide sequence portion
ggcugucuagcaaggcuugc

SEQ ID NO: 2345 - RNA, 20 nt, Artificial Sequence
  LDLR targeting guide sequence portion
ggcuuaaggaagguacaaac

SEQ ID NO: 2346 - RNA, 20 nt, Artificial Sequence
  LDLR targeting guide sequence portion
ggcuuagagauugguggaug

SEQ ID NO: 2347 - RNA, 20 nt, Artificial Sequence
  LDLR targeting guide sequence portion
ggcuuaucacgguucccugc

SEQ ID NO: 2348 - RNA, 20 nt, Artificial Sequence
  LDLR targeting guide sequence portion
ggcuucggacagugcccaug

SEQ ID NO: 2349 - RNA, 20 nt, Artificial Sequence
  LDLR targeting guide sequence portion
ggcuucugggagaugggugu

SEQ ID NO: 2350 - RNA, 20 nt, Artificial Sequence
  LDLR targeting guide sequence portion
ggcuugcauagaagagguaa

SEQ ID NO: 2351 - RNA, 20 nt, Artificial Sequence
  LDLR targeting guide sequence portion
ggcuuggaggcauuugcaua

SEQ ID NO: 2352 - RNA, 20 nt, Artificial Sequence
  LDLR targeting guide sequence portion
ggcuuggguugggauuuugg

SEQ ID NO: 2353 - RNA, 20 nt, Artificial Sequence
  LDLR targeting guide sequence portion
ggcuuucaacacacaacagc

SEQ ID NO: 2354 - RNA, 20 nt, Artificial Sequence
  LDLR targeting guide sequence portion
ggcuuucccuggccugggau

SEQ ID NO: 2355 - RNA, 20 nt, Artificial Sequence
  LDLR targeting guide sequence portion
ggcuuugaagucccggucaa

SEQ ID NO: 2356 - RNA, 20 nt, Artificial Sequence
  LDLR targeting guide sequence portion
gggaaagcccgugucaauga

SEQ ID NO: 2357 - RNA, 20 nt, Artificial Sequence
  LDLR targeting guide sequence portion
gggaaccgugauaagccuuu

SEQ ID NO: 2358 - RNA, 20 nt, Artificial Sequence
  LDLR targeting guide sequence portion
gggaagugaauggcuuggag

SEQ ID NO: 2359 - RNA, 20 nt, Artificial Sequence
  LDLR targeting guide sequence portion
gggaaguggcaucauuuggu

SEQ ID NO: 2360 - RNA, 20 nt, Artificial Sequence
  LDLR targeting guide sequence portion
gggaauggaaguggguaggg

SEQ ID NO: 2361 - RNA, 20 nt, Artificial Sequence
  LDLR targeting guide sequence portion
gggacaauugccaaucccuu

SEQ ID NO: 2362 - RNA, 20 nt, Artificial Sequence
  LDLR targeting guide sequence portion
gggacacaguguuuuguccc

SEQ ID NO: 2363 - RNA, 20 nt, Artificial Sequence
  LDLR targeting guide sequence portion
gggacagagaggggcagguu

SEQ ID NO: 2364 - RNA, 20 nt, Artificial Sequence
  LDLR targeting guide sequence portion
gggacaucauucucccaaaa

SEQ ID NO: 2365 - RNA, 20 nt, Artificial Sequence
  LDLR targeting guide sequence portion
gggaccaggaugacaccucc

SEQ ID NO: 2366 - RNA, 20 nt, Artificial Sequence
  LDLR targeting guide sequence portion
gggacccccuggcccugccu

SEQ ID NO: 2367 - RNA, 20 nt, Artificial Sequence
  LDLR targeting guide sequence portion
gggacgcauuuacgugcucc

SEQ ID NO: 2368 - RNA, 20 nt, Artificial Sequence
  LDLR targeting guide sequence portion
gggacgggacuccaggcaga

SEQ ID NO: 2369 - RNA, 20 nt, Artificial Sequence
  LDLR targeting guide sequence portion
gggacuccaggcagauguuc

SEQ ID NO: 2370 - RNA, 20 nt, Artificial Sequence
  LDLR targeting guide sequence portion
gggacuucaaagccgugauc

SEQ ID NO: 2371 - RNA, 20 nt, Artificial Sequence
  LDLR targeting guide sequence portion
gggacuucagguucuuucug

SEQ ID NO: 2372 - RNA, 20 nt, Artificial Sequence
  LDLR targeting guide sequence portion
gggagaaugauguccccguu

SEQ ID NO: 2373 - RNA, 20 nt, Artificial Sequence
  LDLR targeting guide sequence portion
gggagaugggugucacuuuu

SEQ ID NO: 2374 - RNA, 20 nt, Artificial Sequence
  LDLR targeting guide sequence portion
gggaggaugggcaccaggcu

SEQ ID NO: 2375 - RNA, 20 nt, Artificial Sequence
  LDLR targeting guide sequence portion
gggaggaugguuugagcuca

SEQ ID NO: 2376 - RNA, 20 nt, Artificial Sequence
  LDLR targeting guide sequence portion
gggaggcagaacaggcuucg

SEQ ID NO: 2377 - RNA, 20 nt, Artificial Sequence
  LDLR targeting guide sequence portion
gggaggcugagcuggaucac

SEQ ID NO: 2378 - RNA, 20 nt, Artificial Sequence
  LDLR targeting guide sequence portion
gggaggggaugucaggccca

SEQ ID NO: 2379 - RNA, 20 nt, Artificial Sequence
  LDLR targeting guide sequence portion
gggagucugacggaggcugu

SEQ ID NO: 2380 - RNA, 20 nt, Artificial Sequence
  LDLR targeting guide sequence portion
gggaucccaggccagggaaa

SEQ ID NO: 2381 - RNA, 20 nt, Artificial Sequence
  LDLR targeting guide sequence portion
gggaucccaucccaacacac

SEQ ID NO: 2382 - RNA, 20 nt, Artificial Sequence
  LDLR targeting guide sequence portion
gggaucucgcuuuguugcuc

SEQ ID NO: 2383 - RNA, 20 nt, Artificial Sequence
  LDLR targeting guide sequence portion
gggaugggaucccaggccag

SEQ ID NO: 2384 - RNA, 20 nt, Artificial Sequence
  LDLR targeting guide sequence portion
gggaugucaggcccagagaa

SEQ ID NO: 2385 - RNA, 20 nt, Artificial Sequence
  LDLR targeting guide sequence portion
gggauuacaggcgugaggca

SEQ ID NO: 2386 - RNA, 20 nt, Artificial Sequence
  LDLR targeting guide sequence portion
gggauucauggcgucggaaa

SEQ ID NO: 2387 - RNA, 20 nt, Artificial Sequence
  LDLR targeting guide sequence portion
gggauuggcaauugucccca

SEQ ID NO: 2388 - RNA, 20 nt, Artificial Sequence
  LDLR targeting guide sequence portion
gggauuuugguuucuuccuu

SEQ ID NO: 2389 - RNA, 20 nt, Artificial Sequence
  LDLR targeting guide sequence portion
gggauuuuuuguuauguuug

SEQ ID NO: 2390 - RNA, 20 nt, Artificial Sequence
  LDLR targeting guide sequence portion
gggcaaaggcuaaccuggcu

SEQ ID NO: 2391 - RNA, 20 nt, Artificial Sequence
  LDLR targeting guide sequence portion
gggcaccaggcugguguccu

SEQ ID NO: 2392 - RNA, 20 nt, Artificial Sequence
  LDLR targeting guide sequence portion
gggcacuguccgaagccugu

SEQ ID NO: 2393 - RNA, 20 nt, Artificial Sequence
  LDLR targeting guide sequence portion
gggcagggacgggacuccag

SEQ ID NO: 2394 - RNA, 20 nt, Artificial Sequence
  LDLR targeting guide sequence portion
gggcagguugaccgggacuu

SEQ ID NO: 2395 - RNA, 20 nt, Artificial Sequence
  LDLR targeting guide sequence portion
gggccagggggucccguugg

SEQ ID NO: 2396 - RNA, 20 nt, Artificial Sequence
  LDLR targeting guide sequence portion
gggccccgagaauagucacu

SEQ ID NO: 2397 - RNA, 20 nt, Artificial Sequence
  LDLR targeting guide sequence portion
gggcccuguguaggggguua

SEQ ID NO: 2398 - RNA, 20 nt, Artificial Sequence
  LDLR targeting guide sequence portion
gggccugacauccccucccc

SEQ ID NO: 2399 - RNA, 20 nt, Artificial Sequence
  LDLR targeting guide sequence portion
gggccuguuucucuuauccu

SEQ ID NO: 2400 - RNA, 20 nt, Artificial Sequence
  LDLR targeting guide sequence portion
gggcggacauaaagacgaca

SEQ ID NO: 2401 - RNA, 20 nt, Artificial Sequence
  LDLR targeting guide sequence portion
gggcugcugaugcaccaugc

SEQ ID NO: 2402 - RNA, 20 nt, Artificial Sequence
  LDLR targeting guide sequence portion
gggcuuucccuggccuggga

SEQ ID NO: 2403 - RNA, 20 nt, Artificial Sequence
  LDLR targeting guide sequence portion
ggggaagugaauggcuugga

SEQ ID NO: 2404 - RNA, 20 nt, Artificial Sequence
  LDLR targeting guide sequence portion
ggggacaauugccaaucccu

SEQ ID NO: 2405 - RNA, 20 nt, Artificial Sequence
  LDLR targeting guide sequence portion
ggggacacaguguuuugucc

SEQ ID NO: 2406 - RNA, 20 nt, Artificial Sequence
  LDLR targeting guide sequence portion
ggggacagagaggggcaggu

SEQ ID NO: 2407 - RNA, 20 nt, Artificial Sequence
  LDLR targeting guide sequence portion
ggggacaucauucucccaaa

SEQ ID NO: 2408 - RNA, 20 nt, Artificial Sequence
  LDLR targeting guide sequence portion
ggggaccaggaugacaccuc

SEQ ID NO: 2409 - RNA, 20 nt, Artificial Sequence
  LDLR targeting guide sequence portion
ggggaggggaugucaggccc

SEQ ID NO: 2410 - RNA, 20 nt, Artificial Sequence
  LDLR targeting guide sequence portion
ggggaugucaggcccagaga

SEQ ID NO: 2411 - RNA, 20 nt, Artificial Sequence
  LDLR targeting guide sequence portion
ggggauuuuuuguuauguuu

SEQ ID NO: 2412 - RNA, 20 nt, Artificial Sequence
  LDLR targeting guide sequence portion
ggggcagguugaccgggacu

SEQ ID NO: 2413 - RNA, 20 nt, Artificial Sequence
  LDLR targeting guide sequence portion
ggggcccuguguaggggguu

SEQ ID NO: 2414 - RNA, 20 nt, Artificial Sequence
  LDLR targeting guide sequence portion
gggggacacaguguuuuguc

SEQ ID NO: 2415 - RNA, 20 nt, Artificial Sequence
  LDLR targeting guide sequence portion
gggggaccaggaugacaccu

SEQ ID NO: 2416 - RNA, 20 nt, Artificial Sequence
  LDLR targeting guide sequence portion
ggggggacacaguguuuugu

SEQ ID NO: 2417 - RNA, 20 nt, Artificial Sequence
  LDLR targeting guide sequence portion
ggggggaccaggaugacacc

SEQ ID NO: 2418 - RNA, 20 nt, Artificial Sequence
  LDLR targeting guide sequence portion
gggggucccguuggugccau

SEQ ID NO: 2419 - RNA, 20 nt, Artificial Sequence
  LDLR targeting guide sequence portion
gggggugacagggcaaaggc

SEQ ID NO: 2420 - RNA, 20 nt, Artificial Sequence
  LDLR targeting guide sequence portion
ggggguuauugccucugaaa

SEQ ID NO: 2421 - RNA, 20 nt, Artificial Sequence
  LDLR targeting guide sequence portion
ggggucccguuggugccauc

SEQ ID NO: 2422 - RNA, 20 nt, Artificial Sequence
  LDLR targeting guide sequence portion
ggggucgggaggaugggcac

SEQ ID NO: 2423 - RNA, 20 nt, Artificial Sequence
  LDLR targeting guide sequence portion
ggggugacagggcaaaggcu

SEQ ID NO: 2424 - RNA, 20 nt, Artificial Sequence
  LDLR targeting guide sequence portion
gggguuauugccucugaaau

SEQ ID NO: 2425 - RNA, 20 nt, Artificial Sequence
  LDLR targeting guide sequence portion
gggguuuggcuuagagauug

SEQ ID NO: 2426 - RNA, 20 nt, Artificial Sequence
  LDLR targeting guide sequence portion
ggguacgguggcacgugccu

SEQ ID NO: 2427 - RNA, 20 nt, Artificial Sequence
  LDLR targeting guide sequence portion
ggguaggggucgggaggaug

SEQ ID NO: 2428 - RNA, 20 nt, Artificial Sequence
  LDLR targeting guide sequence portion
ggguauguguuuaaaacaug

SEQ ID NO: 2429 - RNA, 20 nt, Artificial Sequence
  LDLR targeting guide sequence portion
gggucaugauucggggguga

SEQ ID NO: 2430 - RNA, 20 nt, Artificial Sequence
  LDLR targeting guide sequence portion
gggucccguuggugccaucu

SEQ ID NO: 2431 - RNA, 20 nt, Artificial Sequence
  LDLR targeting guide sequence portion
gggucgggaggaugggcacc

SEQ ID NO: 2432 - RNA, 20 nt, Artificial Sequence
  LDLR targeting guide sequence portion
gggugacagggcaaaggcua

SEQ ID NO: 2433 - RNA, 20 nt, Artificial Sequence
  LDLR targeting guide sequence portion
gggugaccagugacucaggc

SEQ ID NO: 2434 - RNA, 20 nt, Artificial Sequence
  LDLR targeting guide sequence portion
gggugcaggccacguguccu

SEQ ID NO: 2435 - RNA, 20 nt, Artificial Sequence
  LDLR targeting guide sequence portion
gggugggucaugauucgggg

SEQ ID NO: 2436 - RNA, 20 nt, Artificial Sequence
  LDLR targeting guide sequence portion
gggugucacuuuuuaaacca

SEQ ID NO: 2437 - RNA, 20 nt, Artificial Sequence
  LDLR targeting guide sequence portion
gggugucucaggcacuuaau

SEQ ID NO: 2438 - RNA, 20 nt, Artificial Sequence
  LDLR targeting guide sequence portion
ggguuauugccucugaaaug

SEQ ID NO: 2439 - RNA, 20 nt, Artificial Sequence
  LDLR targeting guide sequence portion
ggguucugggcagggacggg

SEQ ID NO: 2440 - RNA, 20 nt, Artificial Sequence
  LDLR targeting guide sequence portion
ggguugggauuuugguuucu

SEQ ID NO: 2441 - RNA, 20 nt, Artificial Sequence
  LDLR targeting guide sequence portion
ggguuuggcuuagagauugg

SEQ ID NO: 2442 - RNA, 20 nt, Artificial Sequence
  LDLR targeting guide sequence portion
ggguuuguaccuuccuuaag

SEQ ID NO: 2443 - RNA, 20 nt, Artificial Sequence
  LDLR targeting guide sequence portion
gguaaacacguugacuccug

SEQ ID NO: 2444 - RNA, 20 nt, Artificial Sequence
  LDLR targeting guide sequence portion
gguaaccgggugucucaggc

SEQ ID NO: 2445 - RNA, 20 nt, Artificial Sequence
  LDLR targeting guide sequence portion
gguacaaacccaccucgaaa

SEQ ID NO: 2446 - RNA, 20 nt, Artificial Sequence
  LDLR targeting guide sequence portion
gguaggggucgggaggaugg

SEQ ID NO: 2447 - RNA, 20 nt, Artificial Sequence
  LDLR targeting guide sequence portion
gguauguguuuaaaacaugc

SEQ ID NO: 2448 - RNA, 20 nt, Artificial Sequence
  LDLR targeting guide sequence portion
ggucaaccugccccucucug

SEQ ID NO: 2449 - RNA, 20 nt, Artificial Sequence
  LDLR targeting guide sequence portion
ggucagucuggaggaugacg

SEQ ID NO: 2450 - RNA, 20 nt, Artificial Sequence
  LDLR targeting guide sequence portion
ggucaugauucgggggugac

SEQ ID NO: 2451 - RNA, 20 nt, Artificial Sequence
  LDLR targeting guide sequence portion
gguccccccgggccuguuuc

SEQ ID NO: 2452 - RNA, 20 nt, Artificial Sequence
  LDLR targeting guide sequence portion
ggucccguuggugccaucug

SEQ ID NO: 2453 - RNA, 20 nt, Artificial Sequence
  LDLR targeting guide sequence portion
ggucgggaggaugggcacca

SEQ ID NO: 2454 - RNA, 20 nt, Artificial Sequence
  LDLR targeting guide sequence portion
ggucuccuugcacuuucuca

SEQ ID NO: 2455 - RNA, 20 nt, Artificial Sequence
  LDLR targeting guide sequence portion
ggucucggugccaccacgga

SEQ ID NO: 2456 - RNA, 20 nt, Artificial Sequence
  LDLR targeting guide sequence portion
ggucuucucugucuuugaau

SEQ ID NO: 2457 - RNA, 20 nt, Artificial Sequence
  LDLR targeting guide sequence portion
ggugaaugaguuuggucucg

SEQ ID NO: 2458 - RNA, 20 nt, Artificial Sequence
  LDLR targeting guide sequence portion
ggugacagggcaaaggcuaa

SEQ ID NO: 2459 - RNA, 20 nt, Artificial Sequence
  LDLR targeting guide sequence portion
ggugaccagugacucaggcu

SEQ ID NO: 2460 - RNA, 20 nt, Artificial Sequence
  LDLR targeting guide sequence portion
ggugcaggccacguguccuc

SEQ ID NO: 2461 - RNA, 20 nt, Artificial Sequence
  LDLR targeting guide sequence portion
ggugcaucagcagcccaugg

SEQ ID NO: 2462 - RNA, 20 nt, Artificial Sequence
  LDLR targeting guide sequence portion
ggugccaccacggauucagc

SEQ ID NO: 2463 - RNA, 20 nt, Artificial Sequence
  LDLR targeting guide sequence portion
ggugccaucugcuguugugu

SEQ ID NO: 2464 - RNA, 20 nt, Artificial Sequence
  LDLR targeting guide sequence portion
ggugcccauccucccgaccc

SEQ ID NO: 2465 - RNA, 20 nt, Artificial Sequence
  LDLR targeting guide sequence portion
gguggagagaaacucaaaac

SEQ ID NO: 2466 - RNA, 20 nt, Artificial Sequence
  LDLR targeting guide sequence portion
gguggaugaggcagggccag

SEQ ID NO: 2467 - RNA, 20 nt, Artificial Sequence
  LDLR targeting guide sequence portion
ggugggaggaugguuugagc

SEQ ID NO: 2468 - RNA, 20 nt, Artificial Sequence
  LDLR targeting guide sequence portion
ggugggcggacauaaagacg

SEQ ID NO: 2469 - RNA, 20 nt, Artificial Sequence
  LDLR targeting guide sequence portion
ggugggucaugauucggggg

SEQ ID NO: 2470 - RNA, 20 nt, Artificial Sequence
  LDLR targeting guide sequence portion
gguggguuuguaccuuccuu

SEQ ID NO: 2471 - RNA, 20 nt, Artificial Sequence
  LDLR targeting guide sequence portion
ggugucacuuuuuaaaccac

SEQ ID NO: 2472 - RNA, 20 nt, Artificial Sequence
  LDLR targeting guide sequence portion
ggugucauccuggucccccc

SEQ ID NO: 2473 - RNA, 20 nt, Artificial Sequence
  LDLR targeting guide sequence portion
gguguccugacagccacacc

SEQ ID NO: 2474 - RNA, 20 nt, Artificial Sequence
  LDLR targeting guide sequence portion
ggugucucaggcacuuaaua

SEQ ID NO: 2475 - RNA, 20 nt, Artificial Sequence
  LDLR targeting guide sequence portion
gguguggcugucaggacacc

SEQ ID NO: 2476 - RNA, 20 nt, Artificial Sequence
  LDLR targeting guide sequence portion
gguuaccuuggccgugagga

SEQ ID NO: 2477 - RNA, 20 nt, Artificial Sequence
  LDLR targeting guide sequence portion
gguuagccuuugcccuguca

SEQ ID NO: 2478 - RNA, 20 nt, Artificial Sequence
  LDLR targeting guide sequence portion
gguuauugccucugaaaugc

SEQ ID NO: 2479 - RNA, 20 nt, Artificial Sequence
  LDLR targeting guide sequence portion
gguucugggcagggacggga

SEQ ID NO: 2480 - RNA, 20 nt, Artificial Sequence
  LDLR targeting guide sequence portion
gguucuuucugaaaucgccg

SEQ ID NO: 2481 - RNA, 20 nt, Artificial Sequence
  LDLR targeting guide sequence portion
gguugaccgggacuucaaag

SEQ ID NO: 2482 - RNA, 20 nt, Artificial Sequence
  LDLR targeting guide sequence portion
gguugcuguauuuguucagu

SEQ ID NO: 2483 - RNA, 20 nt, Artificial Sequence
  LDLR targeting guide sequence portion
gguugggauuuugguuucuu

SEQ ID NO: 2484 - RNA, 20 nt, Artificial Sequence
  LDLR targeting guide sequence portion
gguuuaaaaagugacaccca

SEQ ID NO: 2485 - RNA, 20 nt, Artificial Sequence
  LDLR targeting guide sequence portion
gguuucggagcacguaaaug

SEQ ID NO: 2486 - RNA, 20 nt, Artificial Sequence
  LDLR targeting guide sequence portion
gguuucuuccuuuccucgug

SEQ ID NO: 2487 - RNA, 20 nt, Artificial Sequence
  LDLR targeting guide sequence portion
gguuugagcucaggcauuug

SEQ ID NO: 2488 - RNA, 20 nt, Artificial Sequence
  LDLR targeting guide sequence portion
gguuuggcuuagagauuggu

SEQ ID NO: 2489 - RNA, 20 nt, Artificial Sequence
  LDLR targeting guide sequence portion
gguuuguaccuuccuuaagc

SEQ ID NO: 2490 - RNA, 20 nt, Artificial Sequence
  LDLR targeting guide sequence portion
gguuuuuguagagaugggau

SEQ ID NO: 2491 - RNA, 20 nt, Artificial Sequence
  LDLR targeting guide sequence portion
gguuuuuguagccugaaugu

SEQ ID NO: 2492 - RNA, 20 nt, Artificial Sequence
  LDLR targeting guide sequence portion
guaaacacguugacuccuga

SEQ ID NO: 2493 - RNA, 20 nt, Artificial Sequence
  LDLR targeting guide sequence portion
guaaaugcgucccuguacag

SEQ ID NO: 2494 - RNA, 20 nt, Artificial Sequence
  LDLR targeting guide sequence portion
guaacacggcgauuucagaa

SEQ ID NO: 2495 - RNA, 20 nt, Artificial Sequence
  LDLR targeting guide sequence portion
guaaccgggugucucaggca

SEQ ID NO: 2496 - RNA, 20 nt, Artificial Sequence
  LDLR targeting guide sequence portion
guaagacauucaggcuacaa

SEQ ID NO: 2497 - RNA, 20 nt, Artificial Sequence
  LDLR targeting guide sequence portion
guaagaccccaucucuuaaa

SEQ ID NO: 2498 - RNA, 20 nt, Artificial Sequence
  LDLR targeting guide sequence portion
guacaaacccaccucgaaag

SEQ ID NO: 2499 - RNA, 20 nt, Artificial Sequence
  LDLR targeting guide sequence portion
guacaaagauuauuugcacg

SEQ ID NO: 2500 - RNA, 20 nt, Artificial Sequence
  LDLR targeting guide sequence portion
guacaacucugaacugagaa

SEQ ID NO: 2501 - RNA, 20 nt, Artificial Sequence
  LDLR targeting guide sequence portion
guacacaguguacaacucug

SEQ ID NO: 2502 - RNA, 20 nt, Artificial Sequence
  LDLR targeting guide sequence portion
guacacuguguacauuuggc

SEQ ID NO: 2503 - RNA, 20 nt, Artificial Sequence
  LDLR targeting guide sequence portion
guacagauaguggggauuuu

SEQ ID NO: 2504 - RNA, 20 nt, Artificial Sequence
  LDLR targeting guide sequence portion
guacagggacgcauuuacgu

SEQ ID NO: 2505 - RNA, 20 nt, Artificial Sequence
  LDLR targeting guide sequence portion
guacauaaagaagaggcauu

SEQ ID NO: 2506 - RNA, 20 nt, Artificial Sequence
  LDLR targeting guide sequence portion
guacccagcugauuuuuaac

SEQ ID NO: 2507 - RNA, 20 nt, Artificial Sequence
  LDLR targeting guide sequence portion
guaccuuccuuaagccagga

SEQ ID NO: 2508 - RNA, 20 nt, Artificial Sequence
  LDLR targeting guide sequence portion
guagccugaaugucuuacug

SEQ ID NO: 2509 - RNA, 20 nt, Artificial Sequence
  LDLR targeting guide sequence portion
guaggggguuauugccucug

SEQ ID NO: 2510 - RNA, 20 nt, Artificial Sequence
  LDLR targeting guide sequence portion
guaggggucgggaggauggg

SEQ ID NO: 2511 - RNA, 20 nt, Artificial Sequence
  LDLR targeting guide sequence portion
guauagaagguuuuuguagc

SEQ ID NO: 2512 - RNA, 20 nt, Artificial Sequence
  LDLR targeting guide sequence portion
guauauugguugaaacuguu

SEQ ID NO: 2513 - RNA, 20 nt, Artificial Sequence
  LDLR targeting guide sequence portion
guaugaguggcuucugggag

SEQ ID NO: 2514 - RNA, 20 nt, Artificial Sequence
  LDLR targeting guide sequence portion
guauguaugaguggcuucug

SEQ ID NO: 2515 - RNA, 20 nt, Artificial Sequence
  LDLR targeting guide sequence portion
guauguguuuaaaacaugca

SEQ ID NO: 2516 - RNA, 20 nt, Artificial Sequence
  LDLR targeting guide sequence portion
guauuucugaaauagggucu

SEQ ID NO: 2517 - RNA, 20 nt, Artificial Sequence
  LDLR targeting guide sequence portion
guauuuguucagugacuauu

SEQ ID NO: 2518 - RNA, 20 nt, Artificial Sequence
  LDLR targeting guide sequence portion
gucaaacgauccagacugga

SEQ ID NO: 2519 - RNA, 20 nt, Artificial Sequence
  LDLR targeting guide sequence portion
gucaaccugccccucucugu

SEQ ID NO: 2520 - RNA, 20 nt, Artificial Sequence
  LDLR targeting guide sequence portion
gucaacguguuuaccucuuc

SEQ ID NO: 2521 - RNA, 20 nt, Artificial Sequence
  LDLR targeting guide sequence portion
gucaaugaaugccggggaca

SEQ ID NO: 2522 - RNA, 20 nt, Artificial Sequence
  LDLR targeting guide sequence portion
gucacaagggauuggcaauu

SEQ ID NO: 2523 - RNA, 20 nt, Artificial Sequence
  LDLR targeting guide sequence portion
gucacccccgaaucaugacc

SEQ ID NO: 2524 - RNA, 20 nt, Artificial Sequence
  LDLR targeting guide sequence portion
gucacccuuaauauuuauua

SEQ ID NO: 2525 - RNA, 20 nt, Artificial Sequence
  LDLR targeting guide sequence portion
gucacgguggagagaaacuc

SEQ ID NO: 2526 - RNA, 20 nt, Artificial Sequence
  LDLR targeting guide sequence portion
gucacugaacaaauacagca

SEQ ID NO: 2527 - RNA, 20 nt, Artificial Sequence
  LDLR targeting guide sequence portion
gucacuggucacccuuaaua

SEQ ID NO: 2528 - RNA, 20 nt, Artificial Sequence
  LDLR targeting guide sequence portion
gucacugucucuccggacau

SEQ ID NO: 2529 - RNA, 20 nt, Artificial Sequence
  LDLR targeting guide sequence portion
gucacuuuuuaaaccacugu

SEQ ID NO: 2530 - RNA, 20 nt, Artificial Sequence
  LDLR targeting guide sequence portion
gucagacucccgcgugaaga

SEQ ID NO: 2531 - RNA, 20 nt, Artificial Sequence
  LDLR targeting guide sequence portion
gucaggacaccagccuggug

SEQ ID NO: 2532 - RNA, 20 nt, Artificial Sequence
  LDLR targeting guide sequence portion
gucaggcccagagaagcaag

SEQ ID NO: 2533 - RNA, 20 nt, Artificial Sequence
  LDLR targeting guide sequence portion
gucagucuggaggaugacgu

SEQ ID NO: 2534 - RNA, 20 nt, Artificial Sequence
  LDLR targeting guide sequence portion
gucauccuccagacugacca

SEQ ID NO: 2535 - RNA, 20 nt, Artificial Sequence
  LDLR targeting guide sequence portion
gucauccugguccccccggg

SEQ ID NO: 2536 - RNA, 20 nt, Artificial Sequence
  LDLR targeting guide sequence portion
gucaugauucgggggugaca

SEQ ID NO: 2537 - RNA, 20 nt, Artificial Sequence
  LDLR targeting guide sequence portion
guccaguucgugcaaauaau

SEQ ID NO: 2538 - RNA, 20 nt, Artificial Sequence
  LDLR targeting guide sequence portion
guccccagggacaaaacacu

SEQ ID NO: 2539 - RNA, 20 nt, Artificial Sequence
  LDLR targeting guide sequence portion
guccccccgggccuguuucu

SEQ ID NO: 2540 - RNA, 20 nt, Artificial Sequence
  LDLR targeting guide sequence portion
guccccggcauucauugaca

SEQ ID NO: 2541 - RNA, 20 nt, Artificial Sequence
  LDLR targeting guide sequence portion
guccccguuguauguaugag

SEQ ID NO: 2542 - RNA, 20 nt, Artificial Sequence
  LDLR targeting guide sequence portion
gucccggucaaccugccccu

SEQ ID NO: 2543 - RNA, 20 nt, Artificial Sequence
  LDLR targeting guide sequence portion
gucccgucaaacgauccaga

SEQ ID NO: 2544 - RNA, 20 nt, Artificial Sequence
  LDLR targeting guide sequence portion
gucccgucccugcccagaac

SEQ ID NO: 2545 - RNA, 20 nt, Artificial Sequence
  LDLR targeting guide sequence portion
gucccguuggugccaucugc

SEQ ID NO: 2546 - RNA, 20 nt, Artificial Sequence
  LDLR targeting guide sequence portion
gucccugcccagaacccuuc

SEQ ID NO: 2547 - RNA, 20 nt, Artificial Sequence
  LDLR targeting guide sequence portion
gucccuggggacaauugcca

SEQ ID NO: 2548 - RNA, 20 nt, Artificial Sequence
  LDLR targeting guide sequence portion
gucccuguacagauaguggg

SEQ ID NO: 2549 - RNA, 20 nt, Artificial Sequence
  LDLR targeting guide sequence portion
guccgaagccuguucugccu

SEQ ID NO: 2550 - RNA, 20 nt, Artificial Sequence
  LDLR targeting guide sequence portion
guccgcccaccuagugcuuc

SEQ ID NO: 2551 - RNA, 20 nt, Artificial Sequence
  LDLR targeting guide sequence portion
guccggagagacagugacag

SEQ ID NO: 2552 - RNA, 20 nt, Artificial Sequence
  LDLR targeting guide sequence portion
guccucacggccaagguaac

SEQ ID NO: 2553 - RNA, 20 nt, Artificial Sequence
  LDLR targeting guide sequence portion
guccugacagccacaccugg

SEQ ID NO: 2554 - RNA, 20 nt, Artificial Sequence
  LDLR targeting guide sequence portion
gucggaaaugaucuggcuga

SEQ ID NO: 2555 - RNA, 20 nt, Artificial Sequence
  LDLR targeting guide sequence portion
gucgggaggaugggcaccag

SEQ ID NO: 2556 - RNA, 20 nt, Artificial Sequence
  LDLR targeting guide sequence portion
gucgucuuuauguccgccca

SEQ ID NO: 2557 - RNA, 20 nt, Artificial Sequence
  LDLR targeting guide sequence portion
gucgugagcuaugauuaugc

SEQ ID NO: 2558 - RNA, 20 nt, Artificial Sequence
  LDLR targeting guide sequence portion
gucguguguguugggauggg

SEQ ID NO: 2559 - RNA, 20 nt, Artificial Sequence
  LDLR targeting guide sequence portion
gucguugauggguauguguu

SEQ ID NO: 2560 - RNA, 20 nt, Artificial Sequence
  LDLR targeting guide sequence portion
gucuagcaaggcuugcauag

SEQ ID NO: 2561 - RNA, 20 nt, Artificial Sequence
  LDLR targeting guide sequence portion
gucucaggaaggguucuggg

SEQ ID NO: 2562 - RNA, 20 nt, Artificial Sequence
  LDLR targeting guide sequence portion
gucucaggcacuuaauaaau

SEQ ID NO: 2563 - RNA, 20 nt, Artificial Sequence
  LDLR targeting guide sequence portion
gucuccuugcacuuucucag

SEQ ID NO: 2564 - RNA, 20 nt, Artificial Sequence
  LDLR targeting guide sequence portion
gucucggugccaccacggau

SEQ ID NO: 2565 - RNA, 20 nt, Artificial Sequence
  LDLR targeting guide sequence portion
gucucuccggacaucagugc

SEQ ID NO: 2566 - RNA, 20 nt, Artificial Sequence
  LDLR targeting guide sequence portion
gucugacggaggcugucacu

SEQ ID NO: 2567 - RNA, 20 nt, Artificial Sequence
  LDLR targeting guide sequence portion
gucuggaggaugacguggcg

SEQ ID NO: 2568 - RNA, 20 nt, Artificial Sequence
  LDLR targeting guide sequence portion
gucuggaucguuugacggga

SEQ ID NO: 2569 - RNA, 20 nt, Artificial Sequence
  LDLR targeting guide sequence portion
gucuggccaaauucauuuuu

SEQ ID NO: 2570 - RNA, 20 nt, Artificial Sequence
  LDLR targeting guide sequence portion
gucuucucugucuuugaaua

SEQ ID NO: 2571 - RNA, 20 nt, Artificial Sequence
  LDLR targeting guide sequence portion
gucuuuauguccgcccaccu

SEQ ID NO: 2572 - RNA, 20 nt, Artificial Sequence
  LDLR targeting guide sequence portion
gucuuucgagguggguuugu

SEQ ID NO: 2573 - RNA, 20 nt, Artificial Sequence
  LDLR targeting guide sequence portion
gucuuugaauaaaacaaggc

SEQ ID NO: 2574 - RNA, 20 nt, Artificial Sequence
  LDLR targeting guide sequence portion
gugaacaucugccuggaguc

SEQ ID NO: 2575 - RNA, 20 nt, Artificial Sequence
  LDLR targeting guide sequence portion
gugaagaugucacaagggau

SEQ ID NO: 2576 - RNA, 20 nt, Artificial Sequence
  LDLR targeting guide sequence portion
gugaaggauaagagaaacag

SEQ ID NO: 2577 - RNA, 20 nt, Artificial Sequence
  LDLR targeting guide sequence portion
gugaauaucgagaacugcca

SEQ ID NO: 2578 - RNA, 20 nt, Artificial Sequence
  LDLR targeting guide sequence portion
gugaaugaguuuggucucgg

SEQ ID NO: 2579 - RNA, 20 nt, Artificial Sequence
  LDLR targeting guide sequence portion
gugaauggcuuggaggcauu

SEQ ID NO: 2580 - RNA, 20 nt, Artificial Sequence
  LDLR targeting guide sequence portion
gugacacaauccucaaacau

SEQ ID NO: 2581 - RNA, 20 nt, Artificial Sequence
  LDLR targeting guide sequence portion
gugacacccaucucccagaa

SEQ ID NO: 2582 - RNA, 20 nt, Artificial Sequence
  LDLR targeting guide sequence portion
gugacagccuccgucagacu

SEQ ID NO: 2583 - RNA, 20 nt, Artificial Sequence
  LDLR targeting guide sequence portion
gugacagggcaaaggcuaac

SEQ ID NO: 2584 - RNA, 20 nt, Artificial Sequence
  LDLR targeting guide sequence portion
gugacaucuucacgcgggag

SEQ ID NO: 2585 - RNA, 20 nt, Artificial Sequence
  LDLR targeting guide sequence portion
gugaccagugacucaggcuc

SEQ ID NO: 2586 - RNA, 20 nt, Artificial Sequence
  LDLR targeting guide sequence portion
gugacuauucucggggcccu

SEQ ID NO: 2587 - RNA, 20 nt, Artificial Sequence
  LDLR targeting guide sequence portion
gugacucaggcucugccucu

SEQ ID NO: 2588 - RNA, 20 nt, Artificial Sequence
  LDLR targeting guide sequence portion
gugagcuaugauuaugccac

SEQ ID NO: 2589 - RNA, 20 nt, Artificial Sequence
  LDLR targeting guide sequence portion
gugaggacacguggccugca

SEQ ID NO: 2590 - RNA, 20 nt, Artificial Sequence
  LDLR targeting guide sequence portion
gugaggcaccugugucuggc

SEQ ID NO: 2591 - RNA, 20 nt, Artificial Sequence
  LDLR targeting guide sequence portion
gugauaacaguuucaaccaa

SEQ ID NO: 2592 - RNA, 20 nt, Artificial Sequence
  LDLR targeting guide sequence portion
gugauaagccuuucugguuu

SEQ ID NO: 2593 - RNA, 20 nt, Artificial Sequence
  LDLR targeting guide sequence portion
gugauccagcucagccuccc

SEQ ID NO: 2594 - RNA, 20 nt, Artificial Sequence
  LDLR targeting guide sequence portion
gugaucgugaauaucgagaa

SEQ ID NO: 2595 - RNA, 20 nt, Artificial Sequence
  LDLR targeting guide sequence portion
gugcaaaauaauaacacaaa

SEQ ID NO: 2596 - RNA, 20 nt, Artificial Sequence
  LDLR targeting guide sequence portion
gugcaaacauaacaaaaaau

SEQ ID NO: 2597 - RNA, 20 nt, Artificial Sequence
  LDLR targeting guide sequence portion
gugcaacaguaacacggcga

SEQ ID NO: 2598 - RNA, 20 nt, Artificial Sequence
  LDLR targeting guide sequence portion
gugcaacgcuuuuugggaga

SEQ ID NO: 2599 - RNA, 20 nt, Artificial Sequence
  LDLR targeting guide sequence portion
gugcaaggagaccacgggaa

SEQ ID NO: 2600 - RNA, 20 nt, Artificial Sequence
  LDLR targeting guide sequence portion
gugcaggccacguguccuca

SEQ ID NO: 2601 - RNA, 20 nt, Artificial Sequence
  LDLR targeting guide sequence portion
gugcagggaaccgugauaag

SEQ ID NO: 2602 - RNA, 20 nt, Artificial Sequence
  LDLR targeting guide sequence portion
gugcaucagcagcccauggc

SEQ ID NO: 2603 - RNA, 20 nt, Artificial Sequence
  LDLR targeting guide sequence portion
gugcauguuuuaaacacaua

SEQ ID NO: 2604 - RNA, 20 nt, Artificial Sequence
  LDLR targeting guide sequence portion
gugccaccacggauucagcc

SEQ ID NO: 2605 - RNA, 20 nt, Artificial Sequence
  LDLR targeting guide sequence portion
gugccaccguacccagcuga

SEQ ID NO: 2606 - RNA, 20 nt, Artificial Sequence
  LDLR targeting guide sequence portion
gugccaucugcuguugugug

SEQ ID NO: 2607 - RNA, 20 nt, Artificial Sequence
  LDLR targeting guide sequence portion
gugcccauccucccgacccc

SEQ ID NO: 2608 - RNA, 20 nt, Artificial Sequence
  LDLR targeting guide sequence portion
gugcccaugcaauggcuugg

SEQ ID NO: 2609 - RNA, 20 nt, Artificial Sequence
  LDLR targeting guide sequence portion
gugccugagacacccgguua

SEQ ID NO: 2610 - RNA, 20 nt, Artificial Sequence
  LDLR targeting guide sequence portion
gugcuccgaaaccagaaagg

SEQ ID NO: 2611 - RNA, 20 nt, Artificial Sequence
  LDLR targeting guide sequence portion
gugcuuccacuucuaugcaa

SEQ ID NO: 2612 - RNA, 20 nt, Artificial Sequence
  LDLR targeting guide sequence portion
guggaagcacuaggugggcg

SEQ ID NO: 2613 - RNA, 20 nt, Artificial Sequence
  LDLR targeting guide sequence portion
guggagagaaacucaaaacu

SEQ ID NO: 2614 - RNA, 20 nt, Artificial Sequence
  LDLR targeting guide sequence portion
guggaugaggcagggccagg

SEQ ID NO: 2615 - RNA, 20 nt, Artificial Sequence
  LDLR targeting guide sequence portion
guggcaccgagaccaaacuc

SEQ ID NO: 2616 - RNA, 20 nt, Artificial Sequence
  LDLR targeting guide sequence portion
guggcaucauuuggugaaug

SEQ ID NO: 2617 - RNA, 20 nt, Artificial Sequence
  LDLR targeting guide sequence portion
guggcgugaacaucugccug

SEQ ID NO: 2618 - RNA, 20 nt, Artificial Sequence
  LDLR targeting guide sequence portion
guggcugucaggacaccagc

SEQ ID NO: 2619 - RNA, 20 nt, Artificial Sequence
  LDLR targeting guide sequence portion
guggcuucugggagaugggu

SEQ ID NO: 2620 - RNA, 20 nt, Artificial Sequence
  LDLR targeting guide sequence portion
guggcuuucaacacacaaca

SEQ ID NO: 2621 - RNA, 20 nt, Artificial Sequence
  LDLR targeting guide sequence portion
gugggaggaugguuugagcu

SEQ ID NO: 2622 - RNA, 20 nt, Artificial Sequence
  LDLR targeting guide sequence portion
gugggcggacauaaagacga

SEQ ID NO: 2623 - RNA, 20 nt, Artificial Sequence
  LDLR targeting guide sequence portion
guggggauuuuuuguuaugu

SEQ ID NO: 2624 - RNA, 20 nt, Artificial Sequence
  LDLR targeting guide sequence portion
guggguaggggucgggagga

SEQ ID NO: 2625 - RNA, 20 nt, Artificial Sequence
  LDLR targeting guide sequence portion
gugggucaugauucgggggu

SEQ ID NO: 2626 - RNA, 20 nt, Artificial Sequence
  LDLR targeting guide sequence portion
guggguuuguaccuuccuua

SEQ ID NO: 2627 - RNA, 20 nt, Artificial Sequence
  LDLR targeting guide sequence portion
guggucuccuugcacuuucu

SEQ ID NO: 2628 - RNA, 20 nt, Artificial Sequence
  LDLR targeting guide sequence portion
gugguggcaccgagaccaaa

SEQ ID NO: 2629 - RNA, 20 nt, Artificial Sequence
  LDLR targeting guide sequence portion
gugguuuaaaaagugacacc

SEQ ID NO: 2630 - RNA, 20 nt, Artificial Sequence
  LDLR targeting guide sequence portion
guguacaacucugaacugag

SEQ ID NO: 2631 - RNA, 20 nt, Artificial Sequence
  LDLR targeting guide sequence portion
guguacauuuggcauuugug

SEQ ID NO: 2632 - RNA, 20 nt, Artificial Sequence
  LDLR targeting guide sequence portion
guguaggggguuauugccuc

SEQ ID NO: 2633 - RNA, 20 nt, Artificial Sequence
  LDLR targeting guide sequence portion
gugucaaugaaugccgggga

SEQ ID NO: 2634 - RNA, 20 nt, Artificial Sequence
  LDLR targeting guide sequence portion
gugucacgguggagagaaac

SEQ ID NO: 2635 - RNA, 20 nt, Artificial Sequence
  LDLR targeting guide sequence portion
gugucacuuuuuaaaccacu

SEQ ID NO: 2636 - RNA, 20 nt, Artificial Sequence
  LDLR targeting guide sequence portion
gugucauccugguccccccg

SEQ ID NO: 2637 - RNA, 20 nt, Artificial Sequence
  LDLR targeting guide sequence portion
guguccucacggccaaggua

SEQ ID NO: 2638 - RNA, 20 nt, Artificial Sequence
  LDLR targeting guide sequence portion
guguccugacagccacaccu

SEQ ID NO: 2639 - RNA, 20 nt, Artificial Sequence
  LDLR targeting guide sequence portion
gugucucaggcacuuaauaa

SEQ ID NO: 2640 - RNA, 20 nt, Artificial Sequence
  LDLR targeting guide sequence portion
gugucuggccaaauucauuu

SEQ ID NO: 2641 - RNA, 20 nt, Artificial Sequence
  LDLR targeting guide sequence portion
gugucuuucgagguggguuu

SEQ ID NO: 2642 - RNA, 20 nt, Artificial Sequence
  LDLR targeting guide sequence portion
gugugcaacgcuuuuuggga

SEQ ID NO: 2643 - RNA, 20 nt, Artificial Sequence
  LDLR targeting guide sequence portion
guguggcugucaggacacca

SEQ ID NO: 2644 - RNA, 20 nt, Artificial Sequence
  LDLR targeting guide sequence portion
guguguguugggaugggauc

SEQ ID NO: 2645 - RNA, 20 nt, Artificial Sequence
  LDLR targeting guide sequence portion
guguguugaaagccacuugc

SEQ ID NO: 2646 - RNA, 20 nt, Artificial Sequence
  LDLR targeting guide sequence portion
guguguugggaugggauccc

SEQ ID NO: 2647 - RNA, 20 nt, Artificial Sequence
  LDLR targeting guide sequence portion
guguuacuguugcacugaug

SEQ ID NO: 2648 - RNA, 20 nt, Artificial Sequence
  LDLR targeting guide sequence portion
guguuauuauuuugcacugu

SEQ ID NO: 2649 - RNA, 20 nt, Artificial Sequence
  LDLR targeting guide sequence portion
guguugaaagccacuugcuu

SEQ ID NO: 2650 - RNA, 20 nt, Artificial Sequence
  LDLR targeting guide sequence portion
guguugggaugggaucccag

SEQ ID NO: 2651 - RNA, 20 nt, Artificial Sequence
  LDLR targeting guide sequence portion
guguuuaaaacaugcacggu

SEQ ID NO: 2652 - RNA, 20 nt, Artificial Sequence
  LDLR targeting guide sequence portion
guguuuaccucuucuaugca

SEQ ID NO: 2653 - RNA, 20 nt, Artificial Sequence
  LDLR targeting guide sequence portion
guguuuugucccuggggaca

SEQ ID NO: 2654 - RNA, 20 nt, Artificial Sequence
  LDLR targeting guide sequence portion
guuaaaaaucagcuggguac

SEQ ID NO: 2655 - RNA, 20 nt, Artificial Sequence
  LDLR targeting guide sequence portion
guuaccuuggccgugaggac

SEQ ID NO: 2656 - RNA, 20 nt, Artificial Sequence
  LDLR targeting guide sequence portion
guuacuguugcacugauguc

SEQ ID NO: 2657 - RNA, 20 nt, Artificial Sequence
  LDLR targeting guide sequence portion
guuagccuuugcccugucac

SEQ ID NO: 2658 - RNA, 20 nt, Artificial Sequence
  LDLR targeting guide sequence portion
guuauguuugcacuuuguau

SEQ ID NO: 2659 - RNA, 20 nt, Artificial Sequence
  LDLR targeting guide sequence portion
guuauuauuuugcacuguuu

SEQ ID NO: 2660 - RNA, 20 nt, Artificial Sequence
  LDLR targeting guide sequence portion
guuauugccucugaaaugcc

SEQ ID NO: 2661 - RNA, 20 nt, Artificial Sequence
  LDLR targeting guide sequence portion
guucacgccacgucauccuc

SEQ ID NO: 2662 - RNA, 20 nt, Artificial Sequence
  LDLR targeting guide sequence portion
guucagaguuguacacugug

SEQ ID NO: 2663 - RNA, 20 nt, Artificial Sequence
  LDLR targeting guide sequence portion
guucaggaguuggagaccag

SEQ ID NO: 2664 - RNA, 20 nt, Artificial Sequence
  LDLR targeting guide sequence portion
guucagugacuauucucggg

SEQ ID NO: 2665 - RNA, 20 nt, Artificial Sequence
  LDLR targeting guide sequence portion
guucgugcaaauaaucuuug

SEQ ID NO: 2666 - RNA, 20 nt, Artificial Sequence
  LDLR targeting guide sequence portion
guucucgauauucacgauca

SEQ ID NO: 2667 - RNA, 20 nt, Artificial Sequence
  LDLR targeting guide sequence portion
guucugccucccagaugaau

SEQ ID NO: 2668 - RNA, 20 nt, Artificial Sequence
  LDLR targeting guide sequence portion
guucugggcagggacgggac

SEQ ID NO: 2669 - RNA, 20 nt, Artificial Sequence
  LDLR targeting guide sequence portion
guucuuucugaaaucgccgu

SEQ ID NO: 2670 - RNA, 20 nt, Artificial Sequence
  LDLR targeting guide sequence portion
guugaaagccacuugcuucu

SEQ ID NO: 2671 - RNA, 20 nt, Artificial Sequence
  LDLR targeting guide sequence portion
guugaccgggacuucaaagc

SEQ ID NO: 2672 - RNA, 20 nt, Artificial Sequence
  LDLR targeting guide sequence portion
guugacuccugaguuuaggg

SEQ ID NO: 2673 - RNA, 20 nt, Artificial Sequence
  LDLR targeting guide sequence portion
guugauggguauguguuuaa

SEQ ID NO: 2674 - RNA, 20 nt, Artificial Sequence
  LDLR targeting guide sequence portion
guugcacacaguccaguucg

SEQ ID NO: 2675 - RNA, 20 nt, Artificial Sequence
  LDLR targeting guide sequence portion
guugcacugauguccggaga

SEQ ID NO: 2676 - RNA, 20 nt, Artificial Sequence
  LDLR targeting guide sequence portion
guugcucaggccuggucucc

SEQ ID NO: 2677 - RNA, 20 nt, Artificial Sequence
  LDLR targeting guide sequence portion
guugcuguauuuguucagug

SEQ ID NO: 2678 - RNA, 20 nt, Artificial Sequence
  LDLR targeting guide sequence portion
guuggagaccaggccugagc

SEQ ID NO: 2679 - RNA, 20 nt, Artificial Sequence
  LDLR targeting guide sequence portion
guugggaugggaucccaggc

SEQ ID NO: 2680 - RNA, 20 nt, Artificial Sequence
  LDLR targeting guide sequence portion
guugggauuuugguuucuuc

SEQ ID NO: 2681 - RNA, 20 nt, Artificial Sequence
  LDLR targeting guide sequence portion
guuggugccaucugcuguug

SEQ ID NO: 2682 - RNA, 20 nt, Artificial Sequence
  LDLR targeting guide sequence portion
guuguacacuguguacauuu

SEQ ID NO: 2683 - RNA, 20 nt, Artificial Sequence
  LDLR targeting guide sequence portion
guuguauguaugaguggcuu

SEQ ID NO: 2684 - RNA, 20 nt, Artificial Sequence
  LDLR targeting guide sequence portion
guuguauuucugaaauaggg

SEQ ID NO: 2685 - RNA, 20 nt, Artificial Sequence
  LDLR targeting guide sequence portion
guuguguguugaaagccacu

SEQ ID NO: 2686 - RNA, 20 nt, Artificial Sequence
  LDLR targeting guide sequence portion
guuuaaaaagugacacccau

SEQ ID NO: 2687 - RNA, 20 nt, Artificial Sequence
  LDLR targeting guide sequence portion
guuuaaaacaugcacgguga

SEQ ID NO: 2688 - RNA, 20 nt, Artificial Sequence
  LDLR targeting guide sequence portion
guuuaccucuucuaugcaag

SEQ ID NO: 2689 - RNA, 20 nt, Artificial Sequence
  LDLR targeting guide sequence portion
guuuagggguuuggcuuaga

SEQ ID NO: 2690 - RNA, 20 nt, Artificial Sequence
  LDLR targeting guide sequence portion
guuucaaccaauauacaaag

SEQ ID NO: 2691 - RNA, 20 nt, Artificial Sequence
  LDLR targeting guide sequence portion
guuucggagcacguaaaugc

SEQ ID NO: 2692 - RNA, 20 nt, Artificial Sequence
  LDLR targeting guide sequence portion
guuucucuccaccgugacac

SEQ ID NO: 2693 - RNA, 20 nt, Artificial Sequence
  LDLR targeting guide sequence portion
guuucucuuauccuucacga

SEQ ID NO: 2694 - RNA, 20 nt, Artificial Sequence
  LDLR targeting guide sequence portion
guuucuuccuuuccucguga

SEQ ID NO: 2695 - RNA, 20 nt, Artificial Sequence
  LDLR targeting guide sequence portion
guuugacgggacuucagguu

SEQ ID NO: 2696 - RNA, 20 nt, Artificial Sequence
  LDLR targeting guide sequence portion
guuugagcucaggcauuuga

SEQ ID NO: 2697 - RNA, 20 nt, Artificial Sequence
  LDLR targeting guide sequence portion
guuugaggauugugucacgg

SEQ ID NO: 2698 - RNA, 20 nt, Artificial Sequence
  LDLR targeting guide sequence portion
guuugcacuuuguauauugg

SEQ ID NO: 2699 - RNA, 20 nt, Artificial Sequence
  LDLR targeting guide sequence portion
guuuggcuuagagauuggug

SEQ ID NO: 2700 - RNA, 20 nt, Artificial Sequence
  LDLR targeting guide sequence portion
guuuggucucggugccacca

SEQ ID NO: 2701 - RNA, 20 nt, Artificial Sequence
  LDLR targeting guide sequence portion
guuuguaccuuccuuaagcc

SEQ ID NO: 2702 - RNA, 20 nt, Artificial Sequence
  LDLR targeting guide sequence portion
guuuuaaacacauacccauc

SEQ ID NO: 2703 - RNA, 20 nt, Artificial Sequence
  LDLR targeting guide sequence portion
guuuuauucaaagacagaga

SEQ ID NO: 2704 - RNA, 20 nt, Artificial Sequence
  LDLR targeting guide sequence portion
guuuucugucguguguguug

SEQ ID NO: 2705 - RNA, 20 nt, Artificial Sequence
  LDLR targeting guide sequence portion
guuuugaguuucucuccacc

SEQ ID NO: 2706 - RNA, 20 nt, Artificial Sequence
  LDLR targeting guide sequence portion
guuuugucccuggggacaau

SEQ ID NO: 2707 - RNA, 20 nt, Artificial Sequence
  LDLR targeting guide sequence portion
guuuuuguagagaugggauc

SEQ ID NO: 2708 - RNA, 20 nt, Artificial Sequence
  LDLR targeting guide sequence portion
guuuuuguagccugaauguc

SEQ ID NO: 2709 - RNA, 20 nt, Artificial Sequence
  LDLR targeting guide sequence portion
uaaaaaaugaauuuggccag

SEQ ID NO: 2710 - RNA, 20 nt, Artificial Sequence
  LDLR targeting guide sequence portion
uaaaaagugacacccaucuc

SEQ ID NO: 2711 - RNA, 20 nt, Artificial Sequence
  LDLR targeting guide sequence portion
uaaaaaucagcuggguacgg

SEQ ID NO: 2712 - RNA, 20 nt, Artificial Sequence
  LDLR targeting guide sequence portion
uaaaacaaagcucuggcagg

SEQ ID NO: 2713 - RNA, 20 nt, Artificial Sequence
  LDLR targeting guide sequence portion
uaaaacaaggccggcgaggu

SEQ ID NO: 2714 - RNA, 20 nt, Artificial Sequence
  LDLR targeting guide sequence portion
uaaaacaugcacggugaggc

SEQ ID NO: 2715 - RNA, 20 nt, Artificial Sequence
  LDLR targeting guide sequence portion
uaaacacauacccaucaacg

SEQ ID NO: 2716 - RNA, 20 nt, Artificial Sequence
  LDLR targeting guide sequence portion
uaaacacguugacuccugag

SEQ ID NO: 2717 - RNA, 20 nt, Artificial Sequence
  LDLR targeting guide sequence portion
uaaaccacuguauagaaggu

SEQ ID NO: 2718 - RNA, 20 nt, Artificial Sequence
  LDLR targeting guide sequence portion
uaaacucaggagucaacgug

SEQ ID NO: 2719 - RNA, 20 nt, Artificial Sequence
  LDLR targeting guide sequence portion
uaaagaagaggcauuucaga

SEQ ID NO: 2720 - RNA, 20 nt, Artificial Sequence
  LDLR targeting guide sequence portion
uaaagacgacaauggcaguu

SEQ ID NO: 2721 - RNA, 20 nt, Artificial Sequence
  LDLR targeting guide sequence portion
uaaauaaauccuccagucug

SEQ ID NO: 2722 - RNA, 20 nt, Artificial Sequence
  LDLR targeting guide sequence portion
uaaauauuaagggugaccag

SEQ ID NO: 2723 - RNA, 20 nt, Artificial Sequence
  LDLR targeting guide sequence portion
uaaauccuccagucuggauc

SEQ ID NO: 2724 - RNA, 20 nt, Artificial Sequence
  LDLR targeting guide sequence portion
uaaaugcgucccuguacaga

SEQ ID NO: 2725 - RNA, 20 nt, Artificial Sequence
  LDLR targeting guide sequence portion
uaacaaaaaauccccacuau

SEQ ID NO: 2726 - RNA, 20 nt, Artificial Sequence
  LDLR targeting guide sequence portion
uaacacaaaugccaaaugua

SEQ ID NO: 2727 - RNA, 20 nt, Artificial Sequence
  LDLR targeting guide sequence portion
uaacacggcgauuucagaaa

SEQ ID NO: 2728 - RNA, 20 nt, Artificial Sequence
  LDLR targeting guide sequence portion
uaacccccuacacagggccc

SEQ ID NO: 2729 - RNA, 20 nt, Artificial Sequence
  LDLR targeting guide sequence portion
uaaccgggugucucaggcac

SEQ ID NO: 2730 - RNA, 20 nt, Artificial Sequence
  LDLR targeting guide sequence portion
uaaccuggcugucuagcaag

SEQ ID NO: 2731 - RNA, 20 nt, Artificial Sequence
  LDLR targeting guide sequence portion
uaacuuuuugguuuuuguag

SEQ ID NO: 2732 - RNA, 20 nt, Artificial Sequence
  LDLR targeting guide sequence portion
uaagacauucaggcuacaaa

SEQ ID NO: 2733 - RNA, 20 nt, Artificial Sequence
  LDLR targeting guide sequence portion
uaagaccccaucucuuaaaa

SEQ ID NO: 2734 - RNA, 20 nt, Artificial Sequence
  LDLR targeting guide sequence portion
uaagagaaacaggcccgggg

SEQ ID NO: 2735 - RNA, 20 nt, Artificial Sequence
  LDLR targeting guide sequence portion
uaagccaaaccccuaaacuc

SEQ ID NO: 2736 - RNA, 20 nt, Artificial Sequence
  LDLR targeting guide sequence portion
uaagccaggaaagggauuca

SEQ ID NO: 2737 - RNA, 20 nt, Artificial Sequence
  LDLR targeting guide sequence portion
uaagccuuucugguuucgga

SEQ ID NO: 2738 - RNA, 20 nt, Artificial Sequence
  LDLR targeting guide sequence portion
uaaggaagguacaaacccac

SEQ ID NO: 2739 - RNA, 20 nt, Artificial Sequence
  LDLR targeting guide sequence portion
uaagggugaccagugacuca

SEQ ID NO: 2740 - RNA, 20 nt, Artificial Sequence
  LDLR targeting guide sequence portion
uaagugccugagacacccgg

SEQ ID NO: 2741 - RNA, 20 nt, Artificial Sequence
  LDLR targeting guide sequence portion
uaauaaauauuaagggugac

SEQ ID NO: 2742 - RNA, 20 nt, Artificial Sequence
  LDLR targeting guide sequence portion
uaauaacacaaaugccaaau

SEQ ID NO: 2743 - RNA, 20 nt, Artificial Sequence
  LDLR targeting guide sequence portion
uaauauuuauuaagugccug

SEQ ID NO: 2744 - RNA, 20 nt, Artificial Sequence
  LDLR targeting guide sequence portion
uaaucauagcucacgacagc

SEQ ID NO: 2745 - RNA, 20 nt, Artificial Sequence
  LDLR targeting guide sequence portion
uaaucuuuguacauaaagaa

SEQ ID NO: 2746 - RNA, 20 nt, Artificial Sequence
  LDLR targeting guide sequence portion
uaauugaucacaguaagaca

SEQ ID NO: 2747 - RNA, 20 nt, Artificial Sequence
  LDLR targeting guide sequence portion
uacaaaaaccuucuauacag

SEQ ID NO: 2748 - RNA, 20 nt, Artificial Sequence
  LDLR targeting guide sequence portion
uacaaacccaccucgaaaga

SEQ ID NO: 2749 - RNA, 20 nt, Artificial Sequence
  LDLR targeting guide sequence portion
uacaaagauuauuugcacga

SEQ ID NO: 2750 - RNA, 20 nt, Artificial Sequence
  LDLR targeting guide sequence portion
uacaacggggacaucauucu

SEQ ID NO: 2751 - RNA, 20 nt, Artificial Sequence
  LDLR targeting guide sequence portion
uacaacucugaacugagaaa

SEQ ID NO: 2752 - RNA, 20 nt, Artificial Sequence
  LDLR targeting guide sequence portion
uacacagggccccgagaaua

SEQ ID NO: 2753 - RNA, 20 nt, Artificial Sequence
  LDLR targeting guide sequence portion
uacacaguguacaacucuga

SEQ ID NO: 2754 - RNA, 20 nt, Artificial Sequence
  LDLR targeting guide sequence portion
uacacuguguacauuuggca

SEQ ID NO: 2755 - RNA, 20 nt, Artificial Sequence
  LDLR targeting guide sequence portion
uacagauaguggggauuuuu

SEQ ID NO: 2756 - RNA, 20 nt, Artificial Sequence
  LDLR targeting guide sequence portion
uacagcaaccaggguuugca

SEQ ID NO: 2757 - RNA, 20 nt, Artificial Sequence
  LDLR targeting guide sequence portion
uacaggcgugaggcaccugu

SEQ ID NO: 2758 - RNA, 20 nt, Artificial Sequence
  LDLR targeting guide sequence portion
uacagggacgcauuuacgug

SEQ ID NO: 2759 - RNA, 20 nt, Artificial Sequence
  LDLR targeting guide sequence portion
uacagugguuuaaaaaguga

SEQ ID NO: 2760 - RNA, 20 nt, Artificial Sequence
  LDLR targeting guide sequence portion
uacauaaagaagaggcauuu

SEQ ID NO: 2761 - RNA, 20 nt, Artificial Sequence
  LDLR targeting guide sequence portion
uacauacaacggggacauca

SEQ ID NO: 2762 - RNA, 20 nt, Artificial Sequence
  LDLR targeting guide sequence portion
uacccagcugauuuuuaacu

SEQ ID NO: 2763 - RNA, 20 nt, Artificial Sequence
  LDLR targeting guide sequence portion
uacccaucaacgacaagauu

SEQ ID NO: 2764 - RNA, 20 nt, Artificial Sequence
  LDLR targeting guide sequence portion
uaccucuucuaugcaagccu

SEQ ID NO: 2765 - RNA, 20 nt, Artificial Sequence
  LDLR targeting guide sequence portion
uaccuuccuuaagccaggaa

SEQ ID NO: 2766 - RNA, 20 nt, Artificial Sequence
  LDLR targeting guide sequence portion
uaccuuggccgugaggacac

SEQ ID NO: 2767 - RNA, 20 nt, Artificial Sequence
  LDLR targeting guide sequence portion
uacgugcuccgaaaccagaa

SEQ ID NO: 2768 - RNA, 20 nt, Artificial Sequence
  LDLR targeting guide sequence portion
uacuauguugcccaggcugg

SEQ ID NO: 2769 - RNA, 20 nt, Artificial Sequence
  LDLR targeting guide sequence portion
uacuguugcacugauguccg

SEQ ID NO: 2770 - RNA, 20 nt, Artificial Sequence
  LDLR targeting guide sequence portion
uagaagagguaaacacguug

SEQ ID NO: 2771 - RNA, 20 nt, Artificial Sequence
  LDLR targeting guide sequence portion
uagaagguuuuuguagccug

SEQ ID NO: 2772 - RNA, 20 nt, Artificial Sequence
  LDLR targeting guide sequence portion
uagaaguggaagcacuaggu

SEQ ID NO: 2773 - RNA, 20 nt, Artificial Sequence
  LDLR targeting guide sequence portion
uagacagccagguuagccuu

SEQ ID NO: 2774 - RNA, 20 nt, Artificial Sequence
  LDLR targeting guide sequence portion
uagagauugguggaugaggc

SEQ ID NO: 2775 - RNA, 20 nt, Artificial Sequence
  LDLR targeting guide sequence portion
uagcaaggcuugcauagaag

SEQ ID NO: 2776 - RNA, 20 nt, Artificial Sequence
  LDLR targeting guide sequence portion
uagccugaaugucuuacugu

SEQ ID NO: 2777 - RNA, 20 nt, Artificial Sequence
  LDLR targeting guide sequence portion
uagccuuugcccugucaccc

SEQ ID NO: 2778 - RNA, 20 nt, Artificial Sequence
  LDLR targeting guide sequence portion
uagcucacgacagccucaaa

SEQ ID NO: 2779 - RNA, 20 nt, Artificial Sequence
  LDLR targeting guide sequence portion
uaggggguuauugccucuga

SEQ ID NO: 2780 - RNA, 20 nt, Artificial Sequence
  LDLR targeting guide sequence portion
uaggggucgggaggaugggc

SEQ ID NO: 2781 - RNA, 20 nt, Artificial Sequence
  LDLR targeting guide sequence portion
uagggguuuggcuuagagau

SEQ ID NO: 2782 - RNA, 20 nt, Artificial Sequence
  LDLR targeting guide sequence portion
uaggugggcggacauaaaga

SEQ ID NO: 2783 - RNA, 20 nt, Artificial Sequence
  LDLR targeting guide sequence portion
uagucacugaacaaauacag

SEQ ID NO: 2784 - RNA, 20 nt, Artificial Sequence
  LDLR targeting guide sequence portion
uagugcuuccacuucuaugc

SEQ ID NO: 2785 - RNA, 20 nt, Artificial Sequence
  LDLR targeting guide sequence portion
uaguggggauuuuuuguuau

SEQ ID NO: 2786 - RNA, 20 nt, Artificial Sequence
  LDLR targeting guide sequence portion
uaguuguauuucugaaauag

SEQ ID NO: 2787 - RNA, 20 nt, Artificial Sequence
  LDLR targeting guide sequence portion
uauaaaacaaagcucuggca

SEQ ID NO: 2788 - RNA, 20 nt, Artificial Sequence
  LDLR targeting guide sequence portion
uauacagugguuuaaaaagu

SEQ ID NO: 2789 - RNA, 20 nt, Artificial Sequence
  LDLR targeting guide sequence portion
uauagaagguuuuuguagcc

SEQ ID NO: 2790 - RNA, 20 nt, Artificial Sequence
  LDLR targeting guide sequence portion
uauaguuguauuucugaaau

SEQ ID NO: 2791 - RNA, 20 nt, Artificial Sequence
  LDLR targeting guide sequence portion
uauauaaaacaaagcucugg

SEQ ID NO: 2792 - RNA, 20 nt, Artificial Sequence
  LDLR targeting guide sequence portion
uauauauuuauucaucuggg

SEQ ID NO: 2793 - RNA, 20 nt, Artificial Sequence
  LDLR targeting guide sequence portion
uauauuuauucaucugggag

SEQ ID NO: 2794 - RNA, 20 nt, Artificial Sequence
  LDLR targeting guide sequence portion
uauccuucacgaggaaagga

SEQ ID NO: 2795 - RNA, 20 nt, Artificial Sequence
  LDLR targeting guide sequence portion
uaucgagaacugccauuguc

SEQ ID NO: 2796 - RNA, 20 nt, Artificial Sequence
  LDLR targeting guide sequence portion
uaucuguacagggacgcauu

SEQ ID NO: 2797 - RNA, 20 nt, Artificial Sequence
  LDLR targeting guide sequence portion
uaugaguggcuucugggaga

SEQ ID NO: 2798 - RNA, 20 nt, Artificial Sequence
  LDLR targeting guide sequence portion
uaugauuaugccacugcuuu

SEQ ID NO: 2799 - RNA, 20 nt, Artificial Sequence
  LDLR targeting guide sequence portion
uaugcaaaugccuccaagcc

SEQ ID NO: 2800 - RNA, 20 nt, Artificial Sequence
  LDLR targeting guide sequence portion
uaugcaagccuugcuagaca

SEQ ID NO: 2801 - RNA, 20 nt, Artificial Sequence
  LDLR targeting guide sequence portion
uaugccacugcuuuccagcc

SEQ ID NO: 2802 - RNA, 20 nt, Artificial Sequence
  LDLR targeting guide sequence portion
uauguacaaagauuauuugc

SEQ ID NO: 2803 - RNA, 20 nt, Artificial Sequence
  LDLR targeting guide sequence portion
uauguaugaguggcuucugg

SEQ ID NO: 2804 - RNA, 20 nt, Artificial Sequence
  LDLR targeting guide sequence portion
uauguccgcccaccuagugc

SEQ ID NO: 2805 - RNA, 20 nt, Artificial Sequence
  LDLR targeting guide sequence portion
uauguguuuaaaacaugcac

SEQ ID NO: 2806 - RNA, 20 nt, Artificial Sequence
  LDLR targeting guide sequence portion
uauguuugcacuuuguauau

SEQ ID NO: 2807 - RNA, 20 nt, Artificial Sequence
  LDLR targeting guide sequence portion
uauuaagggugaccagugac

SEQ ID NO: 2808 - RNA, 20 nt, Artificial Sequence
  LDLR targeting guide sequence portion
uauuaagugccugagacacc

SEQ ID NO: 2809 - RNA, 20 nt, Artificial Sequence
  LDLR targeting guide sequence portion
uauuauuuugcacuguuuuc

SEQ ID NO: 2810 - RNA, 20 nt, Artificial Sequence
  LDLR targeting guide sequence portion
uauucaaagacagagaagac

SEQ ID NO: 2811 - RNA, 20 nt, Artificial Sequence
  LDLR targeting guide sequence portion
uauucacgaucacggcuuug

SEQ ID NO: 2812 - RNA, 20 nt, Artificial Sequence
  LDLR targeting guide sequence portion
uauucaucugggaggcagaa

SEQ ID NO: 2813 - RNA, 20 nt, Artificial Sequence
  LDLR targeting guide sequence portion
uauucucggggcccugugua

SEQ ID NO: 2814 - RNA, 20 nt, Artificial Sequence
  LDLR targeting guide sequence portion
uauugccucugaaaugccuc

SEQ ID NO: 2815 - RNA, 20 nt, Artificial Sequence
  LDLR targeting guide sequence portion
uauuuauucaucugggaggc

SEQ ID NO: 2816 - RNA, 20 nt, Artificial Sequence
  LDLR targeting guide sequence portion
uauuuauuuuugcaaacccu

SEQ ID NO: 2817 - RNA, 20 nt, Artificial Sequence
  LDLR targeting guide sequence portion
uauuucugaaauagggucuu

SEQ ID NO: 2818 - RNA, 20 nt, Artificial Sequence
  LDLR targeting guide sequence portion
uauuugcacgaacuggacug

SEQ ID NO: 2819 - RNA, 20 nt, Artificial Sequence
  LDLR targeting guide sequence portion
uauuuguucagugacuauuc

SEQ ID NO: 2820 - RNA, 20 nt, Artificial Sequence
  LDLR targeting guide sequence portion
uauuuugcacuguuuucugu

SEQ ID NO: 2821 - RNA, 20 nt, Artificial Sequence
  LDLR targeting guide sequence portion
uauuuuugcaaacccugguu

SEQ ID NO: 2822 - RNA, 20 nt, Artificial Sequence
  LDLR targeting guide sequence portion
ucaaaacuuccuggagagaa

SEQ ID NO: 2823 - RNA, 20 nt, Artificial Sequence
  LDLR targeting guide sequence portion
ucaaacauggaagaugaaag

SEQ ID NO: 2824 - RNA, 20 nt, Artificial Sequence
  LDLR targeting guide sequence portion
ucaaacgauccagacuggag

SEQ ID NO: 2825 - RNA, 20 nt, Artificial Sequence
  LDLR targeting guide sequence portion
ucaaagacagagaagaccaa

SEQ ID NO: 2826 - RNA, 20 nt, Artificial Sequence
  LDLR targeting guide sequence portion
ucaaagccgugaucgugaau

SEQ ID NO: 2827 - RNA, 20 nt, Artificial Sequence
  LDLR targeting guide sequence portion
ucaaaugccugagcucaaac

SEQ ID NO: 2828 - RNA, 20 nt, Artificial Sequence
  LDLR targeting guide sequence portion
ucaacacacaacagcagaug

SEQ ID NO: 2829 - RNA, 20 nt, Artificial Sequence
  LDLR targeting guide sequence portion
ucaaccaauauacaaagugc

SEQ ID NO: 2830 - RNA, 20 nt, Artificial Sequence
  LDLR targeting guide sequence portion
ucaaccugccccucucuguc

SEQ ID NO: 2831 - RNA, 20 nt, Artificial Sequence
  LDLR targeting guide sequence portion
ucaacgacaagauuggggaa

SEQ ID NO: 2832 - RNA, 20 nt, Artificial Sequence
  LDLR targeting guide sequence portion
ucaacguguuuaccucuucu

SEQ ID NO: 2833 - RNA, 20 nt, Artificial Sequence
  LDLR targeting guide sequence portion
ucaagugauccagcucagcc

SEQ ID NO: 2834 - RNA, 20 nt, Artificial Sequence
  LDLR targeting guide sequence portion
ucaaugaaugccggggacag

SEQ ID NO: 2835 - RNA, 20 nt, Artificial Sequence
  LDLR targeting guide sequence portion
ucacaagggauuggcaauug

SEQ ID NO: 2836 - RNA, 20 nt, Artificial Sequence
  LDLR targeting guide sequence portion
ucacaggcacgugccaccgu

SEQ ID NO: 2837 - RNA, 20 nt, Artificial Sequence
  LDLR targeting guide sequence portion
ucacaguaagacauucaggc

SEQ ID NO: 2838 - RNA, 20 nt, Artificial Sequence
  LDLR targeting guide sequence portion
ucaccaaaugaugccacuuc

SEQ ID NO: 2839 - RNA, 20 nt, Artificial Sequence
  LDLR targeting guide sequence portion
ucacccccgaaucaugaccc

SEQ ID NO: 2840 - RNA, 20 nt, Artificial Sequence
  LDLR targeting guide sequence portion
ucacccuuaauauuuauuaa

SEQ ID NO: 2841 - RNA, 20 nt, Artificial Sequence
  LDLR targeting guide sequence portion
ucaccgugcauguuuuaaac

SEQ ID NO: 2842 - RNA, 20 nt, Artificial Sequence
  LDLR targeting guide sequence portion
ucacgaggaaaggaagaaac

SEQ ID NO: 2843 - RNA, 20 nt, Artificial Sequence
  LDLR targeting guide sequence portion
ucacgaucacggcuuugaag

SEQ ID NO: 2844 - RNA, 20 nt, Artificial Sequence
  LDLR targeting guide sequence portion
ucacgccacgucauccucca

SEQ ID NO: 2845 - RNA, 20 nt, Artificial Sequence
  LDLR targeting guide sequence portion
ucacgcgggagucugacgga

SEQ ID NO: 2846 - RNA, 20 nt, Artificial Sequence
  LDLR targeting guide sequence portion
ucacggccaagguaaccggg

SEQ ID NO: 2847 - RNA, 20 nt, Artificial Sequence
  LDLR targeting guide sequence portion
ucacggcuuugaagucccgg

SEQ ID NO: 2848 - RNA, 20 nt, Artificial Sequence
  LDLR targeting guide sequence portion
ucacgguggagagaaacuca

SEQ ID NO: 2849 - RNA, 20 nt, Artificial Sequence
  LDLR targeting guide sequence portion
ucacugaacaaauacagcaa

SEQ ID NO: 2850 - RNA, 20 nt, Artificial Sequence
  LDLR targeting guide sequence portion
ucacuggucacccuuaauau

SEQ ID NO: 2851 - RNA, 20 nt, Artificial Sequence
  LDLR targeting guide sequence portion
ucacugucucuccggacauc

SEQ ID NO: 2852 - RNA, 20 nt, Artificial Sequence
  LDLR targeting guide sequence portion
ucacuuccccaaucuugucg

SEQ ID NO: 2853 - RNA, 20 nt, Artificial Sequence
  LDLR targeting guide sequence portion
ucacuuuuuaaaccacugua

SEQ ID NO: 2854 - RNA, 20 nt, Artificial Sequence
  LDLR targeting guide sequence portion
ucagaaagaaccugaagucc

SEQ ID NO: 2855 - RNA, 20 nt, Artificial Sequence
  LDLR targeting guide sequence portion
ucagacucccgcgugaagau

SEQ ID NO: 2856 - RNA, 20 nt, Artificial Sequence
  LDLR targeting guide sequence portion
ucagaggcaauaacccccua

SEQ ID NO: 2857 - RNA, 20 nt, Artificial Sequence
  LDLR targeting guide sequence portion
ucagaguuguacacugugua

SEQ ID NO: 2858 - RNA, 20 nt, Artificial Sequence
  LDLR targeting guide sequence portion
ucagcagcccauggccucug

SEQ ID NO: 2859 - RNA, 20 nt, Artificial Sequence
  LDLR targeting guide sequence portion
ucagccagaucauuuccgac

SEQ ID NO: 2860 - RNA, 20 nt, Artificial Sequence
  LDLR targeting guide sequence portion
ucagccucgccaugccuggc

SEQ ID NO: 2861 - RNA, 20 nt, Artificial Sequence
  LDLR targeting guide sequence portion
ucagcuggguacgguggcac

SEQ ID NO: 2862 - RNA, 20 nt, Artificial Sequence
  LDLR targeting guide sequence portion
ucaggaaggguucugggcag

SEQ ID NO: 2863 - RNA, 20 nt, Artificial Sequence
  LDLR targeting guide sequence portion
ucaggagucaacguguuuac

SEQ ID NO: 2864 - RNA, 20 nt, Artificial Sequence
  LDLR targeting guide sequence portion
ucaggaguuggagaccaggc

SEQ ID NO: 2865 - RNA, 20 nt, Artificial Sequence
  LDLR targeting guide sequence portion
ucaggcacuuaauaaauauu

SEQ ID NO: 2866 - RNA, 20 nt, Artificial Sequence
  LDLR targeting guide sequence portion
ucaggcauuugaggcugucg

SEQ ID NO: 2867 - RNA, 20 nt, Artificial Sequence
  LDLR targeting guide sequence portion
ucaggcccagagaagcaagu

SEQ ID NO: 2868 - RNA, 20 nt, Artificial Sequence
  LDLR targeting guide sequence portion
ucaggccuggucuccaacuc

SEQ ID NO: 2869 - RNA, 20 nt, Artificial Sequence
  LDLR targeting guide sequence portion
ucaggcuacaaaaaccuucu

SEQ ID NO: 2870 - RNA, 20 nt, Artificial Sequence
  LDLR targeting guide sequence portion
ucaggcucugccucugggaa

SEQ ID NO: 2871 - RNA, 20 nt, Artificial Sequence
  LDLR targeting guide sequence portion
ucagguucuuucugaaaucg

SEQ ID NO: 2872 - RNA, 20 nt, Artificial Sequence
  LDLR targeting guide sequence portion
ucagugacuauucucggggc

SEQ ID NO: 2873 - RNA, 20 nt, Artificial Sequence
  LDLR targeting guide sequence portion
ucagugcaacaguaacacgg

SEQ ID NO: 2874 - RNA, 20 nt, Artificial Sequence
  LDLR targeting guide sequence portion
ucauacauacaacggggaca

SEQ ID NO: 2875 - RNA, 20 nt, Artificial Sequence
  LDLR targeting guide sequence portion
ucauagcucacgacagccuc

SEQ ID NO: 2876 - RNA, 20 nt, Artificial Sequence
  LDLR targeting guide sequence portion
ucauccaccaaucucuaagc

SEQ ID NO: 2877 - RNA, 20 nt, Artificial Sequence
  LDLR targeting guide sequence portion
ucauccuccagacugaccau

SEQ ID NO: 2878 - RNA, 20 nt, Artificial Sequence
  LDLR targeting guide sequence portion
ucauccugguccccccgggc

SEQ ID NO: 2879 - RNA, 20 nt, Artificial Sequence
  LDLR targeting guide sequence portion
ucaucugggaggcagaacag

SEQ ID NO: 2880 - RNA, 20 nt, Artificial Sequence
  LDLR targeting guide sequence portion
ucaucuuccauguuugagga

SEQ ID NO: 2881 - RNA, 20 nt, Artificial Sequence
  LDLR targeting guide sequence portion
ucaugacccacccagugucu

SEQ ID NO: 2882 - RNA, 20 nt, Artificial Sequence
  LDLR targeting guide sequence portion
ucaugauucgggggugacag

SEQ ID NO: 2883 - RNA, 20 nt, Artificial Sequence
  LDLR targeting guide sequence portion
ucauggcgucggaaaugauc

SEQ ID NO: 2884 - RNA, 20 nt, Artificial Sequence
  LDLR targeting guide sequence portion
ucauucaccaaaugaugcca

SEQ ID NO: 2885 - RNA, 20 nt, Artificial Sequence
  LDLR targeting guide sequence portion
ucauucucccaaaaagcguu

SEQ ID NO: 2886 - RNA, 20 nt, Artificial Sequence
  LDLR targeting guide sequence portion
ucauugacacgggcuuuccc

SEQ ID NO: 2887 - RNA, 20 nt, Artificial Sequence
  LDLR targeting guide sequence portion
ucauuuccgacgccaugaau

SEQ ID NO: 2888 - RNA, 20 nt, Artificial Sequence
  LDLR targeting guide sequence portion
ucauuuggugaaugaguuug

SEQ ID NO: 2889 - RNA, 20 nt, Artificial Sequence
  LDLR targeting guide sequence portion
ucauuuuuuaagagaugggg

SEQ ID NO: 2890 - RNA, 20 nt, Artificial Sequence
  LDLR targeting guide sequence portion
uccaagccauucacuucccc

SEQ ID NO: 2891 - RNA, 20 nt, Artificial Sequence
  LDLR targeting guide sequence portion
uccaccaaucucuaagccaa

SEQ ID NO: 2892 - RNA, 20 nt, Artificial Sequence
  LDLR targeting guide sequence portion
uccaccgugacacaauccuc

SEQ ID NO: 2893 - RNA, 20 nt, Artificial Sequence
  LDLR targeting guide sequence portion
uccacuucuaugcaaaugcc

SEQ ID NO: 2894 - RNA, 20 nt, Artificial Sequence
  LDLR targeting guide sequence portion
uccagacuggaggauuuauu

SEQ ID NO: 2895 - RNA, 20 nt, Artificial Sequence
  LDLR targeting guide sequence portion
uccaggaaguuuugaguuuc

SEQ ID NO: 2896 - RNA, 20 nt, Artificial Sequence
  LDLR targeting guide sequence portion
uccaggcagauguucacgcc

SEQ ID NO: 2897 - RNA, 20 nt, Artificial Sequence
  LDLR targeting guide sequence portion
uccagucuggaucguuugac

SEQ ID NO: 2898 - RNA, 20 nt, Artificial Sequence
  LDLR targeting guide sequence portion
uccaguucgugcaaauaauc

SEQ ID NO: 2899 - RNA, 20 nt, Artificial Sequence
  LDLR targeting guide sequence portion
uccauguuugaggauugugu

SEQ ID NO: 2900 - RNA, 20 nt, Artificial Sequence
  LDLR targeting guide sequence portion
uccauucccguggucuccuu

SEQ ID NO: 2901 - RNA, 20 nt, Artificial Sequence
  LDLR targeting guide sequence portion
uccauuucucuccaggaagu

SEQ ID NO: 2902 - RNA, 20 nt, Artificial Sequence
  LDLR targeting guide sequence portion
ucccaaaaagcguugcacac

SEQ ID NO: 2903 - RNA, 20 nt, Artificial Sequence
  LDLR targeting guide sequence portion
ucccaacacacacgacagaa

SEQ ID NO: 2904 - RNA, 20 nt, Artificial Sequence
  LDLR targeting guide sequence portion
ucccaacccaagccauugca

SEQ ID NO: 2905 - RNA, 20 nt, Artificial Sequence
  LDLR targeting guide sequence portion
ucccaccucagccucgccau

SEQ ID NO: 2906 - RNA, 20 nt, Artificial Sequence
  LDLR targeting guide sequence portion
ucccagaagccacucauaca

SEQ ID NO: 2907 - RNA, 20 nt, Artificial Sequence
  LDLR targeting guide sequence portion
ucccagaggcagagccugag

SEQ ID NO: 2908 - RNA, 20 nt, Artificial Sequence
  LDLR targeting guide sequence portion
ucccaggccagggaaagccc

SEQ ID NO: 2909 - RNA, 20 nt, Artificial Sequence
  LDLR targeting guide sequence portion
ucccaucccaacacacacga

SEQ ID NO: 2910 - RNA, 20 nt, Artificial Sequence
  LDLR targeting guide sequence portion
ucccaucucuacaaaaacca

SEQ ID NO: 2911 - RNA, 20 nt, Artificial Sequence
  LDLR targeting guide sequence portion
uccccaaucuugucguugau

SEQ ID NO: 2912 - RNA, 20 nt, Artificial Sequence
  LDLR targeting guide sequence portion
uccccacuaucuguacaggg

SEQ ID NO: 2913 - RNA, 20 nt, Artificial Sequence
  LDLR targeting guide sequence portion
uccccagggacaaaacacug

SEQ ID NO: 2914 - RNA, 20 nt, Artificial Sequence
  LDLR targeting guide sequence portion
uccccccgggccuguuucuc

SEQ ID NO: 2915 - RNA, 20 nt, Artificial Sequence
  LDLR targeting guide sequence portion
uccccggcauucauugacac

SEQ ID NO: 2916 - RNA, 20 nt, Artificial Sequence
  LDLR targeting guide sequence portion
uccccguuguauguaugagu

SEQ ID NO: 2917 - RNA, 20 nt, Artificial Sequence
  LDLR targeting guide sequence portion
uccccuccccuuucaucuuc

SEQ ID NO: 2918 - RNA, 20 nt, Artificial Sequence
  LDLR targeting guide sequence portion
uccccuuucaucuuccaugu

SEQ ID NO: 2919 - RNA, 20 nt, Artificial Sequence
  LDLR targeting guide sequence portion
ucccgaccccuacccacuuc

SEQ ID NO: 2920 - RNA, 20 nt, Artificial Sequence
  LDLR targeting guide sequence portion
ucccgcgugaagaugucaca

SEQ ID NO: 2921 - RNA, 20 nt, Artificial Sequence
  LDLR targeting guide sequence portion
ucccgucaaacgauccagac

SEQ ID NO: 2922 - RNA, 20 nt, Artificial Sequence
  LDLR targeting guide sequence portion
ucccgucccugcccagaacc

SEQ ID NO: 2923 - RNA, 20 nt, Artificial Sequence
  LDLR targeting guide sequence portion
ucccguggucuccuugcacu

SEQ ID NO: 2924 - RNA, 20 nt, Artificial Sequence
  LDLR targeting guide sequence portion
ucccguuggugccaucugcu

SEQ ID NO: 2925 - RNA, 20 nt, Artificial Sequence
  LDLR targeting guide sequence portion
ucccugcccagaacccuucc

SEQ ID NO: 2926 - RNA, 20 nt, Artificial Sequence
  LDLR targeting guide sequence portion
ucccuggccugggaucccau

SEQ ID NO: 2927 - RNA, 20 nt, Artificial Sequence
  LDLR targeting guide sequence portion
ucccuggggacaauugccaa

SEQ ID NO: 2928 - RNA, 20 nt, Artificial Sequence
  LDLR targeting guide sequence portion
ucccuguacagauagugggg

SEQ ID NO: 2929 - RNA, 20 nt, Artificial Sequence
  LDLR targeting guide sequence portion
ucccuugugacaucuucacg

SEQ ID NO: 2930 - RNA, 20 nt, Artificial Sequence
  LDLR targeting guide sequence portion
ucccuuuccuggcuuaagga

SEQ ID NO: 2931 - RNA, 20 nt, Artificial Sequence
  LDLR targeting guide sequence portion
uccgaaaccagaaaggcuua

SEQ ID NO: 2932 - RNA, 20 nt, Artificial Sequence
  LDLR targeting guide sequence portion
uccgaagccuguucugccuc

SEQ ID NO: 2933 - RNA, 20 nt, Artificial Sequence
  LDLR targeting guide sequence portion
uccgacgccaugaaucccuu

SEQ ID NO: 2934 - RNA, 20 nt, Artificial Sequence
  LDLR targeting guide sequence portion
uccgcccaccuagugcuucc

SEQ ID NO: 2935 - RNA, 20 nt, Artificial Sequence
  LDLR targeting guide sequence portion
uccggacaucagugcaacag

SEQ ID NO: 2936 - RNA, 20 nt, Artificial Sequence
  LDLR targeting guide sequence portion
uccggagagacagugacagc

SEQ ID NO: 2937 - RNA, 20 nt, Artificial Sequence
  LDLR targeting guide sequence portion
uccgucagacucccgcguga

SEQ ID NO: 2938 - RNA, 20 nt, Artificial Sequence
  LDLR targeting guide sequence portion
uccgugguggcaccgagacc

SEQ ID NO: 2939 - RNA, 20 nt, Artificial Sequence
  LDLR targeting guide sequence portion
uccucaaacauggaagauga

SEQ ID NO: 2940 - RNA, 20 nt, Artificial Sequence
  LDLR targeting guide sequence portion
uccucacggccaagguaacc

SEQ ID NO: 2941 - RNA, 20 nt, Artificial Sequence
  LDLR targeting guide sequence portion
uccuccagucuggaucguuu

SEQ ID NO: 2942 - RNA, 20 nt, Artificial Sequence
  LDLR targeting guide sequence portion
uccucccaccucagccucgc

SEQ ID NO: 2943 - RNA, 20 nt, Artificial Sequence
  LDLR targeting guide sequence portion
uccucccgaccccuacccac

SEQ ID NO: 2944 - RNA, 20 nt, Artificial Sequence
  LDLR targeting guide sequence portion
uccucgugaaggauaagaga

SEQ ID NO: 2945 - RNA, 20 nt, Artificial Sequence
  LDLR targeting guide sequence portion
uccugaacucaagugaucca

SEQ ID NO: 2946 - RNA, 20 nt, Artificial Sequence
  LDLR targeting guide sequence portion
uccugacagccacaccuggg

SEQ ID NO: 2947 - RNA, 20 nt, Artificial Sequence
  LDLR targeting guide sequence portion
uccugagaccucgccggccu

SEQ ID NO: 2948 - RNA, 20 nt, Artificial Sequence
  LDLR targeting guide sequence portion
uccugaguuuagggguuugg

SEQ ID NO: 2949 - RNA, 20 nt, Artificial Sequence
  LDLR targeting guide sequence portion
uccuggagagaaauggaggu

SEQ ID NO: 2950 - RNA, 20 nt, Artificial Sequence
  LDLR targeting guide sequence portion
uccuggcuuaaggaagguac

SEQ ID NO: 2951 - RNA, 20 nt, Artificial Sequence
  LDLR targeting guide sequence portion
uccugguccccccgggccug

SEQ ID NO: 2952 - RNA, 20 nt, Artificial Sequence
  LDLR targeting guide sequence portion
uccuuaagccaggaaaggga

SEQ ID NO: 2953 - RNA, 20 nt, Artificial Sequence
  LDLR targeting guide sequence portion
uccuucacgaggaaaggaag

SEQ ID NO: 2954 - RNA, 20 nt, Artificial Sequence
  LDLR targeting guide sequence portion
uccuugcacuuucucaguuc

SEQ ID NO: 2955 - RNA, 20 nt, Artificial Sequence
  LDLR targeting guide sequence portion
uccuuuccucgugaaggaua

SEQ ID NO: 2956 - RNA, 20 nt, Artificial Sequence
  LDLR targeting guide sequence portion
ucgaaagacacugggugggu

SEQ ID NO: 2957 - RNA, 20 nt, Artificial Sequence
  LDLR targeting guide sequence portion
ucgagaacugccauugucgu

SEQ ID NO: 2958 - RNA, 20 nt, Artificial Sequence
  LDLR targeting guide sequence portion
ucgagguggguuuguaccuu

SEQ ID NO: 2959 - RNA, 20 nt, Artificial Sequence
  LDLR targeting guide sequence portion
ucgauauucacgaucacggc

SEQ ID NO: 2960 - RNA, 20 nt, Artificial Sequence
  LDLR targeting guide sequence portion
ucgaucauggcucacugcaa

SEQ ID NO: 2961 - RNA, 20 nt, Artificial Sequence
  LDLR targeting guide sequence portion
ucgccaugccuggccagagg

SEQ ID NO: 2962 - RNA, 20 nt, Artificial Sequence
  LDLR targeting guide sequence portion
ucgccggccuuguuuuauuc

SEQ ID NO: 2963 - RNA, 20 nt, Artificial Sequence
  LDLR targeting guide sequence portion
ucgccguguuacuguugcac

SEQ ID NO: 2964 - RNA, 20 nt, Artificial Sequence
  LDLR targeting guide sequence portion
ucgcuuuguugcucaggccu

SEQ ID NO: 2965 - RNA, 20 nt, Artificial Sequence
  LDLR targeting guide sequence portion
ucggaaaugaucuggcugaa

SEQ ID NO: 2966 - RNA, 20 nt, Artificial Sequence
  LDLR targeting guide sequence portion
ucggacagugcccaugcaau

SEQ ID NO: 2967 - RNA, 20 nt, Artificial Sequence
  LDLR targeting guide sequence portion
ucggagcacguaaaugcguc

SEQ ID NO: 2968 - RNA, 20 nt, Artificial Sequence
  LDLR targeting guide sequence portion
ucgggaggaugggcaccagg

SEQ ID NO: 2969 - RNA, 20 nt, Artificial Sequence
  LDLR targeting guide sequence portion
ucggggcccuguguaggggg

SEQ ID NO: 2970 - RNA, 20 nt, Artificial Sequence
  LDLR targeting guide sequence portion
ucgggggugacagggcaaag

SEQ ID NO: 2971 - RNA, 20 nt, Artificial Sequence
  LDLR targeting guide sequence portion
ucggugccaccacggauuca

SEQ ID NO: 2972 - RNA, 20 nt, Artificial Sequence
  LDLR targeting guide sequence portion
ucgucuuuauguccgcccac

SEQ ID NO: 2973 - RNA, 20 nt, Artificial Sequence
  LDLR targeting guide sequence portion
ucgugaaggauaagagaaac

SEQ ID NO: 2974 - RNA, 20 nt, Artificial Sequence
  LDLR targeting guide sequence portion
ucgugaauaucgagaacugc

SEQ ID NO: 2975 - RNA, 20 nt, Artificial Sequence
  LDLR targeting guide sequence portion
ucgugagcuaugauuaugcc

SEQ ID NO: 2976 - RNA, 20 nt, Artificial Sequence
  LDLR targeting guide sequence portion
ucguguguguugggauggga

SEQ ID NO: 2977 - RNA, 20 nt, Artificial Sequence
  LDLR targeting guide sequence portion
ucguugauggguauguguuu

SEQ ID NO: 2978 - RNA, 20 nt, Artificial Sequence
  LDLR targeting guide sequence portion
ucguuugacgggacuucagg

SEQ ID NO: 2979 - RNA, 20 nt, Artificial Sequence
  LDLR targeting guide sequence portion
ucuaagccaaaccccuaaac

SEQ ID NO: 2980 - RNA, 20 nt, Artificial Sequence
  LDLR targeting guide sequence portion
ucuagcaaggcuugcauaga

SEQ ID NO: 2981 - RNA, 20 nt, Artificial Sequence
  LDLR targeting guide sequence portion
ucuauacagugguuuaaaaa

SEQ ID NO: 2982 - RNA, 20 nt, Artificial Sequence
  LDLR targeting guide sequence portion
ucuaugcaaaugccuccaag

SEQ ID NO: 2983 - RNA, 20 nt, Artificial Sequence
  LDLR targeting guide sequence portion
ucuaugcaagccuugcuaga

SEQ ID NO: 2984 - RNA, 20 nt, Artificial Sequence
  LDLR targeting guide sequence portion
ucuauuuauuuuugcaaacc

SEQ ID NO: 2985 - RNA, 20 nt, Artificial Sequence
  LDLR targeting guide sequence portion
ucucaggaaggguucugggc

SEQ ID NO: 2986 - RNA, 20 nt, Artificial Sequence
  LDLR targeting guide sequence portion
ucucaggcacuuaauaaaua

SEQ ID NO: 2987 - RNA, 20 nt, Artificial Sequence
  LDLR targeting guide sequence portion
ucucaguucagaguuguaca

SEQ ID NO: 2988 - RNA, 20 nt, Artificial Sequence
  LDLR targeting guide sequence portion
ucuccaccgugacacaaucc

SEQ ID NO: 2989 - RNA, 20 nt, Artificial Sequence
  LDLR targeting guide sequence portion
ucuccaggaaguuuugaguu

SEQ ID NO: 2990 - RNA, 20 nt, Artificial Sequence
  LDLR targeting guide sequence portion
ucucccaaaaagcguugcac

SEQ ID NO: 2991 - RNA, 20 nt, Artificial Sequence
  LDLR targeting guide sequence portion
ucucccagaagccacucaua

SEQ ID NO: 2992 - RNA, 20 nt, Artificial Sequence
  LDLR targeting guide sequence portion
ucuccggacaucagugcaac

SEQ ID NO: 2993 - RNA, 20 nt, Artificial Sequence
  LDLR targeting guide sequence portion
ucuccuugcacuuucucagu

SEQ ID NO: 2994 - RNA, 20 nt, Artificial Sequence
  LDLR targeting guide sequence portion
ucucgauauucacgaucacg

SEQ ID NO: 2995 - RNA, 20 nt, Artificial Sequence
  LDLR targeting guide sequence portion
ucucgcuuuguugcucaggc

SEQ ID NO: 2996 - RNA, 20 nt, Artificial Sequence
  LDLR targeting guide sequence portion
ucucggggcccuguguaggg

SEQ ID NO: 2997 - RNA, 20 nt, Artificial Sequence
  LDLR targeting guide sequence portion
ucucggugccaccacggauu

SEQ ID NO: 2998 - RNA, 20 nt, Artificial Sequence
  LDLR targeting guide sequence portion
ucucuaagccaaaccccuaa

SEQ ID NO: 2999 - RNA, 20 nt, Artificial Sequence
  LDLR targeting guide sequence portion
ucucuccaccgugacacaau

SEQ ID NO: 3000 - RNA, 20 nt, Artificial Sequence
  LDLR targeting guide sequence portion
ucucuccaggaaguuuugag

SEQ ID NO: 3001 - RNA, 20 nt, Artificial Sequence
  LDLR targeting guide sequence portion
ucucuccggacaucagugca

SEQ ID NO: 3002 - RNA, 20 nt, Artificial Sequence
  LDLR targeting guide sequence portion
ucucugggccugacaucccc

SEQ ID NO: 3003 - RNA, 20 nt, Artificial Sequence
  LDLR targeting guide sequence portion
ucucuguccccggcauucau

SEQ ID NO: 3004 - RNA, 20 nt, Artificial Sequence
  LDLR targeting guide sequence portion
ucucugucuuugaauaaaac

SEQ ID NO: 3005 - RNA, 20 nt, Artificial Sequence
  LDLR targeting guide sequence portion
ucucuuaaaaaaugaauuug

SEQ ID NO: 3006 - RNA, 20 nt, Artificial Sequence
  LDLR targeting guide sequence portion
ucucuuauccuucacgagga

SEQ ID NO: 3007 - RNA, 20 nt, Artificial Sequence
  LDLR targeting guide sequence portion
ucugaaauagggucuucauc

SEQ ID NO: 3008 - RNA, 20 nt, Artificial Sequence
  LDLR targeting guide sequence portion
ucugaaaucgccguguuacu

SEQ ID NO: 3009 - RNA, 20 nt, Artificial Sequence
  LDLR targeting guide sequence portion
ucugaaaugccucuucuuua

SEQ ID NO: 3010 - RNA, 20 nt, Artificial Sequence
  LDLR targeting guide sequence portion
ucugaacugagaaagugcaa

SEQ ID NO: 3011 - RNA, 20 nt, Artificial Sequence
  LDLR targeting guide sequence portion
ucugacggaggcugucacug

SEQ ID NO: 3012 - RNA, 20 nt, Artificial Sequence
  LDLR targeting guide sequence portion
ucugccucccagaugaauaa

SEQ ID NO: 3013 - RNA, 20 nt, Artificial Sequence
  LDLR targeting guide sequence portion
ucugccucugggaaguggca

SEQ ID NO: 3014 - RNA, 20 nt, Artificial Sequence
  LDLR targeting guide sequence portion
ucugccuggagucccguccc

SEQ ID NO: 3015 - RNA, 20 nt, Artificial Sequence
  LDLR targeting guide sequence portion
ucugcuguuguguguugaaa

SEQ ID NO: 3016 - RNA, 20 nt, Artificial Sequence
  LDLR targeting guide sequence portion
ucuggaggaugacguggcgu

SEQ ID NO: 3017 - RNA, 20 nt, Artificial Sequence
  LDLR targeting guide sequence portion
ucuggaucguuugacgggac

SEQ ID NO: 3018 - RNA, 20 nt, Artificial Sequence
  LDLR targeting guide sequence portion
ucuggcaggcaaugcuuugg

SEQ ID NO: 3019 - RNA, 20 nt, Artificial Sequence
  LDLR targeting guide sequence portion
ucuggccaaauucauuuuuu

SEQ ID NO: 3020 - RNA, 20 nt, Artificial Sequence
  LDLR targeting guide sequence portion
ucuggccaggcauggcgagg

SEQ ID NO: 3021 - RNA, 20 nt, Artificial Sequence
  LDLR targeting guide sequence portion
ucuggcugaauccguggugg

SEQ ID NO: 3022 - RNA, 20 nt, Artificial Sequence
  LDLR targeting guide sequence portion
ucugggaaguggcaucauuu

SEQ ID NO: 3023 - RNA, 20 nt, Artificial Sequence
  LDLR targeting guide sequence portion
ucugggagaugggugucacu

SEQ ID NO: 3024 - RNA, 20 nt, Artificial Sequence
  LDLR targeting guide sequence portion
ucugggaggcagaacaggcu

SEQ ID NO: 3025 - RNA, 20 nt, Artificial Sequence
  LDLR targeting guide sequence portion
ucugggcagggacgggacuc

SEQ ID NO: 3026 - RNA, 20 nt, Artificial Sequence
  LDLR targeting guide sequence portion
ucugggccugacauccccuc

SEQ ID NO: 3027 - RNA, 20 nt, Artificial Sequence
  LDLR targeting guide sequence portion
ucugguuucggagcacguaa

SEQ ID NO: 3028 - RNA, 20 nt, Artificial Sequence
  LDLR targeting guide sequence portion
ucuguacagggacgcauuua

SEQ ID NO: 3029 - RNA, 20 nt, Artificial Sequence
  LDLR targeting guide sequence portion
ucuguccccggcauucauug

SEQ ID NO: 3030 - RNA, 20 nt, Artificial Sequence
  LDLR targeting guide sequence portion
ucugucguguguguugggau

SEQ ID NO: 3031 - RNA, 20 nt, Artificial Sequence
  LDLR targeting guide sequence portion
ucugucuuugaauaaaacaa

SEQ ID NO: 3032 - RNA, 20 nt, Artificial Sequence
  LDLR targeting guide sequence portion
ucuuaaaaaaugaauuuggc

SEQ ID NO: 3033 - RNA, 20 nt, Artificial Sequence
  LDLR targeting guide sequence portion
ucuuauccuucacgaggaaa

SEQ ID NO: 3034 - RNA, 20 nt, Artificial Sequence
  LDLR targeting guide sequence portion
ucuucacgcgggagucugac

SEQ ID NO: 3035 - RNA, 20 nt, Artificial Sequence
  LDLR targeting guide sequence portion
ucuuccauguuugaggauug

SEQ ID NO: 3036 - RNA, 20 nt, Artificial Sequence
  LDLR targeting guide sequence portion
ucuuccuuuccucgugaagg

SEQ ID NO: 3037 - RNA, 20 nt, Artificial Sequence
  LDLR targeting guide sequence portion
ucuucuaugcaagccuugcu

SEQ ID NO: 3038 - RNA, 20 nt, Artificial Sequence
  LDLR targeting guide sequence portion
ucuucucugucuuugaauaa

SEQ ID NO: 3039 - RNA, 20 nt, Artificial Sequence
  LDLR targeting guide sequence portion
ucuugucguugauggguaug

SEQ ID NO: 3040 - RNA, 20 nt, Artificial Sequence
  LDLR targeting guide sequence portion
ucuuuauguccgcccaccua

SEQ ID NO: 3041 - RNA, 20 nt, Artificial Sequence
  LDLR targeting guide sequence portion
ucuuucgagguggguuugua

SEQ ID NO: 3042 - RNA, 20 nt, Artificial Sequence
  LDLR targeting guide sequence portion
ucuuucugaaaucgccgugu

SEQ ID NO: 3043 - RNA, 20 nt, Artificial Sequence
  LDLR targeting guide sequence portion
ucuuugaauaaaacaaggcc

SEQ ID NO: 3044 - RNA, 20 nt, Artificial Sequence
  LDLR targeting guide sequence portion
ucuuuguacauaaagaagag

SEQ ID NO: 3045 - RNA, 20 nt, Artificial Sequence
  LDLR targeting guide sequence portion
ugaaagccacuugcuucucu

SEQ ID NO: 3046 - RNA, 20 nt, Artificial Sequence
  LDLR targeting guide sequence portion
ugaaaggggaggggauguca

SEQ ID NO: 3047 - RNA, 20 nt, Artificial Sequence
  LDLR targeting guide sequence portion
ugaaaucgccguguuacugu

SEQ ID NO: 3048 - RNA, 20 nt, Artificial Sequence
  LDLR targeting guide sequence portion
ugaaaugccucuucuuuaug

SEQ ID NO: 3049 - RNA, 20 nt, Artificial Sequence
  LDLR targeting guide sequence portion
ugaacaaauacagcaaccag

SEQ ID NO: 3050 - RNA, 20 nt, Artificial Sequence
  LDLR targeting guide sequence portion
ugaacaucugccuggagucc

SEQ ID NO: 3051 - RNA, 20 nt, Artificial Sequence
  LDLR targeting guide sequence portion
ugaacucaagugauccagcu

SEQ ID NO: 3052 - RNA, 20 nt, Artificial Sequence
  LDLR targeting guide sequence portion
ugaacugagaaagugcaagg

SEQ ID NO: 3053 - RNA, 20 nt, Artificial Sequence
  LDLR targeting guide sequence portion
ugaagacccuauuucagaaa

SEQ ID NO: 3054 - RNA, 20 nt, Artificial Sequence
  LDLR targeting guide sequence portion
ugaagaugucacaagggauu

SEQ ID NO: 3055 - RNA, 20 nt, Artificial Sequence
  LDLR targeting guide sequence portion
ugaaggauaagagaaacagg

SEQ ID NO: 3056 - RNA, 20 nt, Artificial Sequence
  LDLR targeting guide sequence portion
ugaagucccggucaaccugc

SEQ ID NO: 3057 - RNA, 20 nt, Artificial Sequence
  LDLR targeting guide sequence portion
ugaagucccgucaaacgauc

SEQ ID NO: 3058 - RNA, 20 nt, Artificial Sequence
  LDLR targeting guide sequence portion
ugaauaaaacaaggccggcg

SEQ ID NO: 3059 - RNA, 20 nt, Artificial Sequence
  LDLR targeting guide sequence portion
ugaauaucgagaacugccau

SEQ ID NO: 3060 - RNA, 20 nt, Artificial Sequence
  LDLR targeting guide sequence portion
ugaaucccuuuccuggcuua

SEQ ID NO: 3061 - RNA, 20 nt, Artificial Sequence
  LDLR targeting guide sequence portion
ugaauccgugguggcaccga

SEQ ID NO: 3062 - RNA, 20 nt, Artificial Sequence
  LDLR targeting guide sequence portion
ugaaugaguuuggucucggu

SEQ ID NO: 3063 - RNA, 20 nt, Artificial Sequence
  LDLR targeting guide sequence portion
ugaaugccggggacagagag

SEQ ID NO: 3064 - RNA, 20 nt, Artificial Sequence
  LDLR targeting guide sequence portion
ugaauggcuuggaggcauuu

SEQ ID NO: 3065 - RNA, 20 nt, Artificial Sequence
  LDLR targeting guide sequence portion
ugaauuuggccagacacagg

SEQ ID NO: 3066 - RNA, 20 nt, Artificial Sequence
  LDLR targeting guide sequence portion
ugacacaauccucaaacaug

SEQ ID NO: 3067 - RNA, 20 nt, Artificial Sequence
  LDLR targeting guide sequence portion
ugacacccaucucccagaag

SEQ ID NO: 3068 - RNA, 20 nt, Artificial Sequence
  LDLR targeting guide sequence portion
ugacaccuccauuucucucc

SEQ ID NO: 3069 - RNA, 20 nt, Artificial Sequence
  LDLR targeting guide sequence portion
ugacacgggcuuucccuggc

SEQ ID NO: 3070 - RNA, 20 nt, Artificial Sequence
  LDLR targeting guide sequence portion
ugacagccacaccugggugc

SEQ ID NO: 3071 - RNA, 20 nt, Artificial Sequence
  LDLR targeting guide sequence portion
ugacagccuccgucagacuc

SEQ ID NO: 3072 - RNA, 20 nt, Artificial Sequence
  LDLR targeting guide sequence portion
ugacagggcaaaggcuaacc

SEQ ID NO: 3073 - RNA, 20 nt, Artificial Sequence
  LDLR targeting guide sequence portion
ugacauccccuccccuuuca

SEQ ID NO: 3074 - RNA, 20 nt, Artificial Sequence
  LDLR targeting guide sequence portion
ugacaucuucacgcgggagu

SEQ ID NO: 3075 - RNA, 20 nt, Artificial Sequence
  LDLR targeting guide sequence portion
ugaccagugacucaggcucu

SEQ ID NO: 3076 - RNA, 20 nt, Artificial Sequence
  LDLR targeting guide sequence portion
ugacccacccagugucuuuc

SEQ ID NO: 3077 - RNA, 20 nt, Artificial Sequence
  LDLR targeting guide sequence portion
ugaccgggacuucaaagccg

SEQ ID NO: 3078 - RNA, 20 nt, Artificial Sequence
  LDLR targeting guide sequence portion
ugacggaggcugucacuguc

SEQ ID NO: 3079 - RNA, 20 nt, Artificial Sequence
  LDLR targeting guide sequence portion
ugacgggacuucagguucuu

SEQ ID NO: 3080 - RNA, 20 nt, Artificial Sequence
  LDLR targeting guide sequence portion
ugacguggcgugaacaucug

SEQ ID NO: 3081 - RNA, 20 nt, Artificial Sequence
  LDLR targeting guide sequence portion
ugacuauucucggggcccug

SEQ ID NO: 3082 - RNA, 20 nt, Artificial Sequence
  LDLR targeting guide sequence portion
ugacucaggcucugccucug

SEQ ID NO: 3083 - RNA, 20 nt, Artificial Sequence
  LDLR targeting guide sequence portion
ugacuccugaguuuaggggu

SEQ ID NO: 3084 - RNA, 20 nt, Artificial Sequence
  LDLR targeting guide sequence portion
ugagaaagugcaaggagacc

SEQ ID NO: 3085 - RNA, 20 nt, Artificial Sequence
  LDLR targeting guide sequence portion
ugagacacccgguuaccuug

SEQ ID NO: 3086 - RNA, 20 nt, Artificial Sequence
  LDLR targeting guide sequence portion
ugagaccucgccggccuugu

SEQ ID NO: 3087 - RNA, 20 nt, Artificial Sequence
  LDLR targeting guide sequence portion
ugagcaacaaagcgagaucc

SEQ ID NO: 3088 - RNA, 20 nt, Artificial Sequence
  LDLR targeting guide sequence portion
ugagccacugcgcccggccu

SEQ ID NO: 3089 - RNA, 20 nt, Artificial Sequence
  LDLR targeting guide sequence portion
ugagcuaugauuaugccacu

SEQ ID NO: 3090 - RNA, 20 nt, Artificial Sequence
  LDLR targeting guide sequence portion
ugagcucaggcauuugaggc

SEQ ID NO: 3091 - RNA, 20 nt, Artificial Sequence
  LDLR targeting guide sequence portion
ugagcuggaucacuugaguu

SEQ ID NO: 3092 - RNA, 20 nt, Artificial Sequence
  LDLR targeting guide sequence portion
ugaggacacguggccugcac

SEQ ID NO: 3093 - RNA, 20 nt, Artificial Sequence
  LDLR targeting guide sequence portion
ugaggauugugucacggugg

SEQ ID NO: 3094 - RNA, 20 nt, Artificial Sequence
  LDLR targeting guide sequence portion
ugaggcaccugugucuggcc

SEQ ID NO: 3095 - RNA, 20 nt, Artificial Sequence
  LDLR targeting guide sequence portion
ugaggcagggccaggggguc

SEQ ID NO: 3096 - RNA, 20 nt, Artificial Sequence
  LDLR targeting guide sequence portion
ugaggcugucgugagcuaug

SEQ ID NO: 3097 - RNA, 20 nt, Artificial Sequence
  LDLR targeting guide sequence portion
ugagucacuggucacccuua

SEQ ID NO: 3098 - RNA, 20 nt, Artificial Sequence
  LDLR targeting guide sequence portion
ugaguggcuucugggagaug

SEQ ID NO: 3099 - RNA, 20 nt, Artificial Sequence
  LDLR targeting guide sequence portion
ugaguucaggaguuggagac

SEQ ID NO: 3100 - RNA, 20 nt, Artificial Sequence
  LDLR targeting guide sequence portion
ugaguuuagggguuuggcuu

SEQ ID NO: 3101 - RNA, 20 nt, Artificial Sequence
  LDLR targeting guide sequence portion
ugaguuucucuccaccguga

SEQ ID NO: 3102 - RNA, 20 nt, Artificial Sequence
  LDLR targeting guide sequence portion
ugaguuuggucucggugcca

SEQ ID NO: 3103 - RNA, 20 nt, Artificial Sequence
  LDLR targeting guide sequence portion
ugauaagccuuucugguuuc

SEQ ID NO: 3104 - RNA, 20 nt, Artificial Sequence
  LDLR targeting guide sequence portion
ugaucacaguaagacauuca

SEQ ID NO: 3105 - RNA, 20 nt, Artificial Sequence
  LDLR targeting guide sequence portion
ugauccagcucagccuccca

SEQ ID NO: 3106 - RNA, 20 nt, Artificial Sequence
  LDLR targeting guide sequence portion
ugaucgugaauaucgagaac

SEQ ID NO: 3107 - RNA, 20 nt, Artificial Sequence
  LDLR targeting guide sequence portion
ugaucuggcugaauccgugg

SEQ ID NO: 3108 - RNA, 20 nt, Artificial Sequence
  LDLR targeting guide sequence portion
ugaugccacuucccagaggc

SEQ ID NO: 3109 - RNA, 20 nt, Artificial Sequence
  LDLR targeting guide sequence portion
ugauggguauguguuuaaaa

SEQ ID NO: 3110 - RNA, 20 nt, Artificial Sequence
  LDLR targeting guide sequence portion
ugauguccccguuguaugua

SEQ ID NO: 3111 - RNA, 20 nt, Artificial Sequence
  LDLR targeting guide sequence portion
ugauguccggagagacagug

SEQ ID NO: 3112 - RNA, 20 nt, Artificial Sequence
  LDLR targeting guide sequence portion
ugauuaugccacugcuuucc

SEQ ID NO: 3113 - RNA, 20 nt, Artificial Sequence
  LDLR targeting guide sequence portion
ugauucgggggugacagggc

SEQ ID NO: 3114 - RNA, 20 nt, Artificial Sequence
  LDLR targeting guide sequence portion
ugcaaacauaacaaaaaauc

SEQ ID NO: 3115 - RNA, 20 nt, Artificial Sequence
  LDLR targeting guide sequence portion
ugcaaacccugguugcugua

SEQ ID NO: 3116 - RNA, 20 nt, Artificial Sequence
  LDLR targeting guide sequence portion
ugcaaaugccuccaagccau

SEQ ID NO: 3117 - RNA, 20 nt, Artificial Sequence
  LDLR targeting guide sequence portion
ugcaacaguaacacggcgau

SEQ ID NO: 3118 - RNA, 20 nt, Artificial Sequence
  LDLR targeting guide sequence portion
ugcaacgcuuuuugggagaa

SEQ ID NO: 3119 - RNA, 20 nt, Artificial Sequence
  LDLR targeting guide sequence portion
ugcaagccuugcuagacagc

SEQ ID NO: 3120 - RNA, 20 nt, Artificial Sequence
  LDLR targeting guide sequence portion
ugcaaggagaccacgggaau

SEQ ID NO: 3121 - RNA, 20 nt, Artificial Sequence
  LDLR targeting guide sequence portion
ugcaauggcuuggguuggga

SEQ ID NO: 3122 - RNA, 20 nt, Artificial Sequence
  LDLR targeting guide sequence portion
ugcacacaguccaguucgug

SEQ ID NO: 3123 - RNA, 20 nt, Artificial Sequence
  LDLR targeting guide sequence portion
ugcacgaacuggacugugug

SEQ ID NO: 3124 - RNA, 20 nt, Artificial Sequence
  LDLR targeting guide sequence portion
ugcacggugaggccgggcgc

SEQ ID NO: 3125 - RNA, 20 nt, Artificial Sequence
  LDLR targeting guide sequence portion
ugcacugauguccggagaga

SEQ ID NO: 3126 - RNA, 20 nt, Artificial Sequence
  LDLR targeting guide sequence portion
ugcacuguuuucugucgugu

SEQ ID NO: 3127 - RNA, 20 nt, Artificial Sequence
  LDLR targeting guide sequence portion
ugcacuuucucaguucagag

SEQ ID NO: 3128 - RNA, 20 nt, Artificial Sequence
  LDLR targeting guide sequence portion
ugcacuuuguauauugguug

SEQ ID NO: 3129 - RNA, 20 nt, Artificial Sequence
  LDLR targeting guide sequence portion
ugcaggccacguguccucac

SEQ ID NO: 3130 - RNA, 20 nt, Artificial Sequence
  LDLR targeting guide sequence portion
ugcagggaaccgugauaagc

SEQ ID NO: 3131 - RNA, 20 nt, Artificial Sequence
  LDLR targeting guide sequence portion
ugcauagaagagguaaacac

SEQ ID NO: 3132 - RNA, 20 nt, Artificial Sequence
  LDLR targeting guide sequence portion
ugcauagaaguggaagcacu

SEQ ID NO: 3133 - RNA, 20 nt, Artificial Sequence
  LDLR targeting guide sequence portion
ugcaucagcagcccauggcc

SEQ ID NO: 3134 - RNA, 20 nt, Artificial Sequence
  LDLR targeting guide sequence portion
ugcaugggcacuguccgaag

SEQ ID NO: 3135 - RNA, 20 nt, Artificial Sequence
  LDLR targeting guide sequence portion
ugcauggugcaucagcagcc

SEQ ID NO: 3136 - RNA, 20 nt, Artificial Sequence
  LDLR targeting guide sequence portion
ugcauguuuuaaacacauac

SEQ ID NO: 3137 - RNA, 20 nt, Artificial Sequence
  LDLR targeting guide sequence portion
ugccaaauguacacagugua

SEQ ID NO: 3138 - RNA, 20 nt, Artificial Sequence
  LDLR targeting guide sequence portion
ugccaaucccuugugacauc

SEQ ID NO: 3139 - RNA, 20 nt, Artificial Sequence
  LDLR targeting guide sequence portion
ugccaccacggauucagcca

SEQ ID NO: 3140 - RNA, 20 nt, Artificial Sequence
  LDLR targeting guide sequence portion
ugccaccguacccagcugau

SEQ ID NO: 3141 - RNA, 20 nt, Artificial Sequence
  LDLR targeting guide sequence portion
ugccacuucccagaggcaga

SEQ ID NO: 3142 - RNA, 20 nt, Artificial Sequence
  LDLR targeting guide sequence portion
ugccaucugcuguugugugu

SEQ ID NO: 3143 - RNA, 20 nt, Artificial Sequence
  LDLR targeting guide sequence portion
ugccauugucgucuuuaugu

SEQ ID NO: 3144 - RNA, 20 nt, Artificial Sequence
  LDLR targeting guide sequence portion
ugcccagaacccuuccugag

SEQ ID NO: 3145 - RNA, 20 nt, Artificial Sequence
  LDLR targeting guide sequence portion
ugcccaggcuggaaagcagu

SEQ ID NO: 3146 - RNA, 20 nt, Artificial Sequence
  LDLR targeting guide sequence portion
ugcccauccucccgaccccu

SEQ ID NO: 3147 - RNA, 20 nt, Artificial Sequence
  LDLR targeting guide sequence portion
ugcccaugcaauggcuuggg

SEQ ID NO: 3148 - RNA, 20 nt, Artificial Sequence
  LDLR targeting guide sequence portion
ugccccucucuguccccggc

SEQ ID NO: 3149 - RNA, 20 nt, Artificial Sequence
  LDLR targeting guide sequence portion
ugcccugucacccccgaauc

SEQ ID NO: 3150 - RNA, 20 nt, Artificial Sequence
  LDLR targeting guide sequence portion
ugccucauccaccaaucucu

SEQ ID NO: 3151 - RNA, 20 nt, Artificial Sequence
  LDLR targeting guide sequence portion
ugccuccaagccauucacuu

SEQ ID NO: 3152 - RNA, 20 nt, Artificial Sequence
  LDLR targeting guide sequence portion
ugccucccagaugaauaaau

SEQ ID NO: 3153 - RNA, 20 nt, Artificial Sequence
  LDLR targeting guide sequence portion
ugccucugggaaguggcauc

SEQ ID NO: 3154 - RNA, 20 nt, Artificial Sequence
  LDLR targeting guide sequence portion
ugccucuucuuuauguacaa

SEQ ID NO: 3155 - RNA, 20 nt, Artificial Sequence
  LDLR targeting guide sequence portion
ugccugagacacccgguuac

SEQ ID NO: 3156 - RNA, 20 nt, Artificial Sequence
  LDLR targeting guide sequence portion
ugccugccagagcuuuguuu

SEQ ID NO: 3157 - RNA, 20 nt, Artificial Sequence
  LDLR targeting guide sequence portion
ugccuggagucccgucccug

SEQ ID NO: 3158 - RNA, 20 nt, Artificial Sequence
  LDLR targeting guide sequence portion
ugccuggccagaggccaugg

SEQ ID NO: 3159 - RNA, 20 nt, Artificial Sequence
  LDLR targeting guide sequence portion
ugcgcccggccucaccgugc

SEQ ID NO: 3160 - RNA, 20 nt, Artificial Sequence
  LDLR targeting guide sequence portion
ugcgucccuguacagauagu

SEQ ID NO: 3161 - RNA, 20 nt, Artificial Sequence
  LDLR targeting guide sequence portion
ugcuagacagccagguuagc

SEQ ID NO: 3162 - RNA, 20 nt, Artificial Sequence
  LDLR targeting guide sequence portion
ugcucaggccuggucuccaa

SEQ ID NO: 3163 - RNA, 20 nt, Artificial Sequence
  LDLR targeting guide sequence portion
ugcuccgaaaccagaaaggc

SEQ ID NO: 3164 - RNA, 20 nt, Artificial Sequence
  LDLR targeting guide sequence portion
ugcugaugcaccaugcaugg

SEQ ID NO: 3165 - RNA, 20 nt, Artificial Sequence
  LDLR targeting guide sequence portion
ugcuguauuuguucagugac

SEQ ID NO: 3166 - RNA, 20 nt, Artificial Sequence
  LDLR targeting guide sequence portion
ugcuguuguguguugaaagc

SEQ ID NO: 3167 - RNA, 20 nt, Artificial Sequence
  LDLR targeting guide sequence portion
ugcuuccacuucuaugcaaa

SEQ ID NO: 3168 - RNA, 20 nt, Artificial Sequence
  LDLR targeting guide sequence portion
ugcuucucugggccugacau

SEQ ID NO: 3169 - RNA, 20 nt, Artificial Sequence
  LDLR targeting guide sequence portion
ugcuuuccagccugggcaac

SEQ ID NO: 3170 - RNA, 20 nt, Artificial Sequence
  LDLR targeting guide sequence portion
ugcuuuggucuucucugucu

SEQ ID NO: 3171 - RNA, 20 nt, Artificial Sequence
  LDLR targeting guide sequence portion
uggaaagcaguggcauaauc

SEQ ID NO: 3172 - RNA, 20 nt, Artificial Sequence
  LDLR targeting guide sequence portion
uggaagaugaaaggggaggg

SEQ ID NO: 3173 - RNA, 20 nt, Artificial Sequence
  LDLR targeting guide sequence portion
uggaagcacuaggugggcgg

SEQ ID NO: 3174 - RNA, 20 nt, Artificial Sequence
  LDLR targeting guide sequence portion
uggaaguggguaggggucgg

SEQ ID NO: 3175 - RNA, 20 nt, Artificial Sequence
  LDLR targeting guide sequence portion
uggacugugugcaacgcuuu

SEQ ID NO: 3176 - RNA, 20 nt, Artificial Sequence
  LDLR targeting guide sequence portion
uggagaccaggccugagcaa

SEQ ID NO: 3177 - RNA, 20 nt, Artificial Sequence
  LDLR targeting guide sequence portion
uggagagaaacucaaaacuu

SEQ ID NO: 3178 - RNA, 20 nt, Artificial Sequence
  LDLR targeting guide sequence portion
uggaggaugacguggcguga

SEQ ID NO: 3179 - RNA, 20 nt, Artificial Sequence
  LDLR targeting guide sequence portion
uggaggcauuugcauagaag

SEQ ID NO: 3180 - RNA, 20 nt, Artificial Sequence
  LDLR targeting guide sequence portion
uggaggugucauccuggucc

SEQ ID NO: 3181 - RNA, 20 nt, Artificial Sequence
  LDLR targeting guide sequence portion
uggagguugcagugagccau

SEQ ID NO: 3182 - RNA, 20 nt, Artificial Sequence
  LDLR targeting guide sequence portion
uggagucccgucccugccca

SEQ ID NO: 3183 - RNA, 20 nt, Artificial Sequence
  LDLR targeting guide sequence portion
uggaucguuugacgggacuu

SEQ ID NO: 3184 - RNA, 20 nt, Artificial Sequence
  LDLR targeting guide sequence portion
uggaugaggcagggccaggg

SEQ ID NO: 3185 - RNA, 20 nt, Artificial Sequence
  LDLR targeting guide sequence portion
uggcaauuguccccagggac

SEQ ID NO: 3186 - RNA, 20 nt, Artificial Sequence
  LDLR targeting guide sequence portion
uggcaccaacgggacccccu

SEQ ID NO: 3187 - RNA, 20 nt, Artificial Sequence
  LDLR targeting guide sequence portion
uggcaccgagaccaaacuca

SEQ ID NO: 3188 - RNA, 20 nt, Artificial Sequence
  LDLR targeting guide sequence portion
uggcaggcaaugcuuugguc

SEQ ID NO: 3189 - RNA, 20 nt, Artificial Sequence
  LDLR targeting guide sequence portion
uggcaguucucgauauucac

SEQ ID NO: 3190 - RNA, 20 nt, Artificial Sequence
  LDLR targeting guide sequence portion
uggcaucauuuggugaauga

SEQ ID NO: 3191 - RNA, 20 nt, Artificial Sequence
  LDLR targeting guide sequence portion
uggcauuuguguuauuauuu

SEQ ID NO: 3192 - RNA, 20 nt, Artificial Sequence
  LDLR targeting guide sequence portion
uggccaaauucauuuuuuaa

SEQ ID NO: 3193 - RNA, 20 nt, Artificial Sequence
  LDLR targeting guide sequence portion
uggccagacacaggugccuc

SEQ ID NO: 3194 - RNA, 20 nt, Artificial Sequence
  LDLR targeting guide sequence portion
uggccagaggccaugggcug

SEQ ID NO: 3195 - RNA, 20 nt, Artificial Sequence
  LDLR targeting guide sequence portion
uggccaggcauggcgaggcu

SEQ ID NO: 3196 - RNA, 20 nt, Artificial Sequence
  LDLR targeting guide sequence portion
uggcccugccucauccacca

SEQ ID NO: 3197 - RNA, 20 nt, Artificial Sequence
  LDLR targeting guide sequence portion
uggccgugaggacacguggc

SEQ ID NO: 3198 - RNA, 20 nt, Artificial Sequence
  LDLR targeting guide sequence portion
uggccucuggccaggcaugg

SEQ ID NO: 3199 - RNA, 20 nt, Artificial Sequence
  LDLR targeting guide sequence portion
uggccugcacccaggugugg

SEQ ID NO: 3200 - RNA, 20 nt, Artificial Sequence
  LDLR targeting guide sequence portion
uggccugggaucccauccca

SEQ ID NO: 3201 - RNA, 20 nt, Artificial Sequence
  LDLR targeting guide sequence portion
uggcgaggcugaggugggag

SEQ ID NO: 3202 - RNA, 20 nt, Artificial Sequence
  LDLR targeting guide sequence portion
uggcgucggaaaugaucugg

SEQ ID NO: 3203 - RNA, 20 nt, Artificial Sequence
  LDLR targeting guide sequence portion
uggcgugaacaucugccugg

SEQ ID NO: 3204 - RNA, 20 nt, Artificial Sequence
  LDLR targeting guide sequence portion
uggcugaauccgugguggca

SEQ ID NO: 3205 - RNA, 20 nt, Artificial Sequence
  LDLR targeting guide sequence portion
uggcugucuagcaaggcuug

SEQ ID NO: 3206 - RNA, 20 nt, Artificial Sequence
  LDLR targeting guide sequence portion
uggcuuaaggaagguacaaa

SEQ ID NO: 3207 - RNA, 20 nt, Artificial Sequence
  LDLR targeting guide sequence portion
uggcuuagagauugguggau

SEQ ID NO: 3208 - RNA, 20 nt, Artificial Sequence
  LDLR targeting guide sequence portion
uggcuucugggagaugggug

SEQ ID NO: 3209 - RNA, 20 nt, Artificial Sequence
  LDLR targeting guide sequence portion
uggcuuggaggcauuugcau

SEQ ID NO: 3210 - RNA, 20 nt, Artificial Sequence
  LDLR targeting guide sequence portion
uggcuuggguugggauuuug

SEQ ID NO: 3211 - RNA, 20 nt, Artificial Sequence
  LDLR targeting guide sequence portion
uggcuuucaacacacaacag

SEQ ID NO: 3212 - RNA, 20 nt, Artificial Sequence
  LDLR targeting guide sequence portion
ugggaaguggcaucauuugg

SEQ ID NO: 3213 - RNA, 20 nt, Artificial Sequence
  LDLR targeting guide sequence portion
ugggagaaugauguccccgu

SEQ ID NO: 3214 - RNA, 20 nt, Artificial Sequence
  LDLR targeting guide sequence portion
ugggagaugggugucacuuu

SEQ ID NO: 3215 - RNA, 20 nt, Artificial Sequence
  LDLR targeting guide sequence portion
ugggaggaugguuugagcuc

SEQ ID NO: 3216 - RNA, 20 nt, Artificial Sequence
  LDLR targeting guide sequence portion
ugggaggcagaacaggcuuc

SEQ ID NO: 3217 - RNA, 20 nt, Artificial Sequence
  LDLR targeting guide sequence portion
ugggaggcugagcuggauca

SEQ ID NO: 3218 - RNA, 20 nt, Artificial Sequence
  LDLR targeting guide sequence portion
ugggaucccaggccagggaa

SEQ ID NO: 3219 - RNA, 20 nt, Artificial Sequence
  LDLR targeting guide sequence portion
ugggaucccaucccaacaca

SEQ ID NO: 3220 - RNA, 20 nt, Artificial Sequence
  LDLR targeting guide sequence portion
ugggaucucgcuuuguugcu

SEQ ID NO: 3221 - RNA, 20 nt, Artificial Sequence
  LDLR targeting guide sequence portion
ugggaugggaucccaggcca

SEQ ID NO: 3222 - RNA, 20 nt, Artificial Sequence
  LDLR targeting guide sequence portion
ugggauuacaggcgugaggc

SEQ ID NO: 3223 - RNA, 20 nt, Artificial Sequence
  LDLR targeting guide sequence portion
ugggauuuugguuucuuccu

SEQ ID NO: 3224 - RNA, 20 nt, Artificial Sequence
  LDLR targeting guide sequence portion
ugggcaccaggcuggugucc

SEQ ID NO: 3225 - RNA, 20 nt, Artificial Sequence
  LDLR targeting guide sequence portion
ugggcacuguccgaagccug

SEQ ID NO: 3226 - RNA, 20 nt, Artificial Sequence
  LDLR targeting guide sequence portion
ugggcagggacgggacucca

SEQ ID NO: 3227 - RNA, 20 nt, Artificial Sequence
  LDLR targeting guide sequence portion
ugggccugacauccccuccc

SEQ ID NO: 3228 - RNA, 20 nt, Artificial Sequence
  LDLR targeting guide sequence portion
ugggcggacauaaagacgac

SEQ ID NO: 3229 - RNA, 20 nt, Artificial Sequence
  LDLR targeting guide sequence portion
ugggcugcugaugcaccaug

SEQ ID NO: 3230 - RNA, 20 nt, Artificial Sequence
  LDLR targeting guide sequence portion
uggggaagugaauggcuugg

SEQ ID NO: 3231 - RNA, 20 nt, Artificial Sequence
  LDLR targeting guide sequence portion
uggggacaauugccaauccc

SEQ ID NO: 3232 - RNA, 20 nt, Artificial Sequence
  LDLR targeting guide sequence portion
uggggauuuuuuguuauguu

SEQ ID NO: 3233 - RNA, 20 nt, Artificial Sequence
  LDLR targeting guide sequence portion
uggguacgguggcacgugcc

SEQ ID NO: 3234 - RNA, 20 nt, Artificial Sequence
  LDLR targeting guide sequence portion
uggguaggggucgggaggau

SEQ ID NO: 3235 - RNA, 20 nt, Artificial Sequence
  LDLR targeting guide sequence portion
uggguauguguuuaaaacau

SEQ ID NO: 3236 - RNA, 20 nt, Artificial Sequence
  LDLR targeting guide sequence portion
ugggucaugauucgggggug

SEQ ID NO: 3237 - RNA, 20 nt, Artificial Sequence
  LDLR targeting guide sequence portion
ugggugcaggccacgugucc

SEQ ID NO: 3238 - RNA, 20 nt, Artificial Sequence
  LDLR targeting guide sequence portion
ugggugggucaugauucggg

SEQ ID NO: 3239 - RNA, 20 nt, Artificial Sequence
  LDLR targeting guide sequence portion
ugggugucacuuuuuaaacc

SEQ ID NO: 3240 - RNA, 20 nt, Artificial Sequence
  LDLR targeting guide sequence portion
uggguugggauuuugguuuc

SEQ ID NO: 3241 - RNA, 20 nt, Artificial Sequence
  LDLR targeting guide sequence portion
uggguuuguaccuuccuuaa

SEQ ID NO: 3242 - RNA, 20 nt, Artificial Sequence
  LDLR targeting guide sequence portion
uggucacccuuaauauuuau

SEQ ID NO: 3243 - RNA, 20 nt, Artificial Sequence
  LDLR targeting guide sequence portion
uggucagucuggaggaugac

SEQ ID NO: 3244 - RNA, 20 nt, Artificial Sequence
  LDLR targeting guide sequence portion
ugguccccccgggccuguuu

SEQ ID NO: 3245 - RNA, 20 nt, Artificial Sequence
  LDLR targeting guide sequence portion
uggucucggugccaccacgg

SEQ ID NO: 3246 - RNA, 20 nt, Artificial Sequence
  LDLR targeting guide sequence portion
uggucuucucugucuuugaa

SEQ ID NO: 3247 - RNA, 20 nt, Artificial Sequence
  LDLR targeting guide sequence portion
uggugaaugaguuuggucuc

SEQ ID NO: 3248 - RNA, 20 nt, Artificial Sequence
  LDLR targeting guide sequence portion
uggugcaucagcagcccaug

SEQ ID NO: 3249 - RNA, 20 nt, Artificial Sequence
  LDLR targeting guide sequence portion
uggugccaucugcuguugug

SEQ ID NO: 3250 - RNA, 20 nt, Artificial Sequence
  LDLR targeting guide sequence portion
uggugcccauccucccgacc

SEQ ID NO: 3251 - RNA, 20 nt, Artificial Sequence
  LDLR targeting guide sequence portion
ugguggaugaggcagggcca

SEQ ID NO: 3252 - RNA, 20 nt, Artificial Sequence
  LDLR targeting guide sequence portion
ugguggcaccgagaccaaac

SEQ ID NO: 3253 - RNA, 20 nt, Artificial Sequence
  LDLR targeting guide sequence portion
ugguguccugacagccacac

SEQ ID NO: 3254 - RNA, 20 nt, Artificial Sequence
  LDLR targeting guide sequence portion
ugguugcuguauuuguucag

SEQ ID NO: 3255 - RNA, 20 nt, Artificial Sequence
  LDLR targeting guide sequence portion
ugguuuaaaaagugacaccc

SEQ ID NO: 3256 - RNA, 20 nt, Artificial Sequence
  LDLR targeting guide sequence portion
ugguuucggagcacguaaau

SEQ ID NO: 3257 - RNA, 20 nt, Artificial Sequence
  LDLR targeting guide sequence portion
ugguuucuuccuuuccucgu

SEQ ID NO: 3258 - RNA, 20 nt, Artificial Sequence
  LDLR targeting guide sequence portion
ugguuugagcucaggcauuu

SEQ ID NO: 3259 - RNA, 20 nt, Artificial Sequence
  LDLR targeting guide sequence portion
ugguuuuuguagagauggga

SEQ ID NO: 3260 - RNA, 20 nt, Artificial Sequence
  LDLR targeting guide sequence portion
uguacaaagauuauuugcac

SEQ ID NO: 3261 - RNA, 20 nt, Artificial Sequence
  LDLR targeting guide sequence portion
uguacaacucugaacugaga

SEQ ID NO: 3262 - RNA, 20 nt, Artificial Sequence
  LDLR targeting guide sequence portion
uguacacaguguacaacucu

SEQ ID NO: 3263 - RNA, 20 nt, Artificial Sequence
  LDLR targeting guide sequence portion
uguacagauaguggggauuu

SEQ ID NO: 3264 - RNA, 20 nt, Artificial Sequence
  LDLR targeting guide sequence portion
uguacagggacgcauuuacg

SEQ ID NO: 3265 - RNA, 20 nt, Artificial Sequence
  LDLR targeting guide sequence portion
uguacauaaagaagaggcau

SEQ ID NO: 3266 - RNA, 20 nt, Artificial Sequence
  LDLR targeting guide sequence portion
uguaccuuccuuaagccagg

SEQ ID NO: 3267 - RNA, 20 nt, Artificial Sequence
  LDLR targeting guide sequence portion
uguagccugaaugucuuacu

SEQ ID NO: 3268 - RNA, 20 nt, Artificial Sequence
  LDLR targeting guide sequence portion
uguaggggguuauugccucu

SEQ ID NO: 3269 - RNA, 20 nt, Artificial Sequence
  LDLR targeting guide sequence portion
uguauagaagguuuuuguag

SEQ ID NO: 3270 - RNA, 20 nt, Artificial Sequence
  LDLR targeting guide sequence portion
uguauauugguugaaacugu

SEQ ID NO: 3271 - RNA, 20 nt, Artificial Sequence
  LDLR targeting guide sequence portion
uguaugaguggcuucuggga

SEQ ID NO: 3272 - RNA, 20 nt, Artificial Sequence
  LDLR targeting guide sequence portion
uguauguaugaguggcuucu

SEQ ID NO: 3273 - RNA, 20 nt, Artificial Sequence
  LDLR targeting guide sequence portion
uguauuucugaaauaggguc

SEQ ID NO: 3274 - RNA, 20 nt, Artificial Sequence
  LDLR targeting guide sequence portion
uguauuuguucagugacuau

SEQ ID NO: 3275 - RNA, 20 nt, Artificial Sequence
  LDLR targeting guide sequence portion
ugucaaugaaugccggggac

SEQ ID NO: 3276 - RNA, 20 nt, Artificial Sequence
  LDLR targeting guide sequence portion
ugucacaagggauuggcaau

SEQ ID NO: 3277 - RNA, 20 nt, Artificial Sequence
  LDLR targeting guide sequence portion
ugucacccccgaaucaugac

SEQ ID NO: 3278 - RNA, 20 nt, Artificial Sequence
  LDLR targeting guide sequence portion
ugucacgguggagagaaacu

SEQ ID NO: 3279 - RNA, 20 nt, Artificial Sequence
  LDLR targeting guide sequence portion
ugucacugucucuccggaca

SEQ ID NO: 3280 - RNA, 20 nt, Artificial Sequence
  LDLR targeting guide sequence portion
ugucacuuuuuaaaccacug

SEQ ID NO: 3281 - RNA, 20 nt, Artificial Sequence
  LDLR targeting guide sequence portion
ugucaggacaccagccuggu

SEQ ID NO: 3282 - RNA, 20 nt, Artificial Sequence
  LDLR targeting guide sequence portion
ugucaggcccagagaagcaa

SEQ ID NO: 3283 - RNA, 20 nt, Artificial Sequence
  LDLR targeting guide sequence portion
ugucauccugguccccccgg

SEQ ID NO: 3284 - RNA, 20 nt, Artificial Sequence
  LDLR targeting guide sequence portion
uguccccagggacaaaacac

SEQ ID NO: 3285 - RNA, 20 nt, Artificial Sequence
  LDLR targeting guide sequence portion
uguccccggcauucauugac

SEQ ID NO: 3286 - RNA, 20 nt, Artificial Sequence
  LDLR targeting guide sequence portion
uguccccguuguauguauga

SEQ ID NO: 3287 - RNA, 20 nt, Artificial Sequence
  LDLR targeting guide sequence portion
ugucccuggggacaauugcc

SEQ ID NO: 3288 - RNA, 20 nt, Artificial Sequence
  LDLR targeting guide sequence portion
uguccgaagccuguucugcc

SEQ ID NO: 3289 - RNA, 20 nt, Artificial Sequence
  LDLR targeting guide sequence portion
uguccgcccaccuagugcuu

SEQ ID NO: 3290 - RNA, 20 nt, Artificial Sequence
  LDLR targeting guide sequence portion
uguccggagagacagugaca

SEQ ID NO: 3291 - RNA, 20 nt, Artificial Sequence
  LDLR targeting guide sequence portion
uguccucacggccaagguaa

SEQ ID NO: 3292 - RNA, 20 nt, Artificial Sequence
  LDLR targeting guide sequence portion
uguccugacagccacaccug

SEQ ID NO: 3293 - RNA, 20 nt, Artificial Sequence
  LDLR targeting guide sequence portion
ugucgucuuuauguccgccc

SEQ ID NO: 3294 - RNA, 20 nt, Artificial Sequence
  LDLR targeting guide sequence portion
ugucguguguguugggaugg

SEQ ID NO: 3295 - RNA, 20 nt, Artificial Sequence
  LDLR targeting guide sequence portion
ugucguugauggguaugugu

SEQ ID NO: 3296 - RNA, 20 nt, Artificial Sequence
  LDLR targeting guide sequence portion
ugucuagcaaggcuugcaua

SEQ ID NO: 3297 - RNA, 20 nt, Artificial Sequence
  LDLR targeting guide sequence portion
ugucucuccggacaucagug

SEQ ID NO: 3298 - RNA, 20 nt, Artificial Sequence
  LDLR targeting guide sequence portion
ugucuggccaaauucauuuu

SEQ ID NO: 3299 - RNA, 20 nt, Artificial Sequence
  LDLR targeting guide sequence portion
ugucuuucgagguggguuug

SEQ ID NO: 3300 - RNA, 20 nt, Artificial Sequence
  LDLR targeting guide sequence portion
ugucuuugaauaaaacaagg

SEQ ID NO: 3301 - RNA, 20 nt, Artificial Sequence
  LDLR targeting guide sequence portion
ugugacaucuucacgcggga

SEQ ID NO: 3302 - RNA, 20 nt, Artificial Sequence
  LDLR targeting guide sequence portion
ugugcaacgcuuuuugggag

SEQ ID NO: 3303 - RNA, 20 nt, Artificial Sequence
  LDLR targeting guide sequence portion
uguggcugucaggacaccag

SEQ ID NO: 3304 - RNA, 20 nt, Artificial Sequence
  LDLR targeting guide sequence portion
uguguacauuuggcauuugu

SEQ ID NO: 3305 - RNA, 20 nt, Artificial Sequence
  LDLR targeting guide sequence portion
uguguaggggguuauugccu

SEQ ID NO: 3306 - RNA, 20 nt, Artificial Sequence
  LDLR targeting guide sequence portion
ugugucacgguggagagaaa

SEQ ID NO: 3307 - RNA, 20 nt, Artificial Sequence
  LDLR targeting guide sequence portion
ugugucuggccaaauucauu

SEQ ID NO: 3308 - RNA, 20 nt, Artificial Sequence
  LDLR targeting guide sequence portion
ugugugcaacgcuuuuuggg

SEQ ID NO: 3309 - RNA, 20 nt, Artificial Sequence
  LDLR targeting guide sequence portion
uguguguugaaagccacuug

SEQ ID NO: 3310 - RNA, 20 nt, Artificial Sequence
  LDLR targeting guide sequence portion
uguguguugggaugggaucc

SEQ ID NO: 3311 - RNA, 20 nt, Artificial Sequence
  LDLR targeting guide sequence portion
uguguugaaagccacuugcu

SEQ ID NO: 3312 - RNA, 20 nt, Artificial Sequence
  LDLR targeting guide sequence portion
uguguugggaugggauccca

SEQ ID NO: 3313 - RNA, 20 nt, Artificial Sequence
  LDLR targeting guide sequence portion
uguguuuaaaacaugcacgg

SEQ ID NO: 3314 - RNA, 20 nt, Artificial Sequence
  LDLR targeting guide sequence portion
uguuacuguugcacugaugu

SEQ ID NO: 3315 - RNA, 20 nt, Artificial Sequence
  LDLR targeting guide sequence portion
uguuauguuugcacuuugua

SEQ ID NO: 3316 - RNA, 20 nt, Artificial Sequence
  LDLR targeting guide sequence portion
uguucacgccacgucauccu

SEQ ID NO: 3317 - RNA, 20 nt, Artificial Sequence
  LDLR targeting guide sequence portion
uguucagugacuauucucgg

SEQ ID NO: 3318 - RNA, 20 nt, Artificial Sequence
  LDLR targeting guide sequence portion
uguucugccucccagaugaa

SEQ ID NO: 3319 - RNA, 20 nt, Artificial Sequence
  LDLR targeting guide sequence portion
uguugaaagccacuugcuuc

SEQ ID NO: 3320 - RNA, 20 nt, Artificial Sequence
  LDLR targeting guide sequence portion
uguugcacugauguccggag

SEQ ID NO: 3321 - RNA, 20 nt, Artificial Sequence
  LDLR targeting guide sequence portion
uguugcucaggccuggucuc

SEQ ID NO: 3322 - RNA, 20 nt, Artificial Sequence
  LDLR targeting guide sequence portion
uguugggaugggaucccagg

SEQ ID NO: 3323 - RNA, 20 nt, Artificial Sequence
  LDLR targeting guide sequence portion
uguuguguguugaaagccac

SEQ ID NO: 3324 - RNA, 20 nt, Artificial Sequence
  LDLR targeting guide sequence portion
uguuuaaaacaugcacggug

SEQ ID NO: 3325 - RNA, 20 nt, Artificial Sequence
  LDLR targeting guide sequence portion
uguuuaccucuucuaugcaa

SEQ ID NO: 3326 - RNA, 20 nt, Artificial Sequence
  LDLR targeting guide sequence portion
uguuucucuuauccuucacg

SEQ ID NO: 3327 - RNA, 20 nt, Artificial Sequence
  LDLR targeting guide sequence portion
uguuugaggauugugucacg

SEQ ID NO: 3328 - RNA, 20 nt, Artificial Sequence
  LDLR targeting guide sequence portion
uguuugcacuuuguauauug

SEQ ID NO: 3329 - RNA, 20 nt, Artificial Sequence
  LDLR targeting guide sequence portion
uguuuuaaacacauacccau

SEQ ID NO: 3330 - RNA, 20 nt, Artificial Sequence
  LDLR targeting guide sequence portion
uguuuuauucaaagacagag

SEQ ID NO: 3331 - RNA, 20 nt, Artificial Sequence
  LDLR targeting guide sequence portion
uguuuugucccuggggacaa

SEQ ID NO: 3332 - RNA, 20 nt, Artificial Sequence
  LDLR targeting guide sequence portion
uuaaaaaaugaauuuggcca

SEQ ID NO: 3333 - RNA, 20 nt, Artificial Sequence
  LDLR targeting guide sequence portion
uuaaaaagugacacccaucu

SEQ ID NO: 3334 - RNA, 20 nt, Artificial Sequence
  LDLR targeting guide sequence portion
uuaaaaaucagcuggguacg

SEQ ID NO: 3335 - RNA, 20 nt, Artificial Sequence
  LDLR targeting guide sequence portion
uuaaaacaugcacggugagg

SEQ ID NO: 3336 - RNA, 20 nt, Artificial Sequence
  LDLR targeting guide sequence portion
uuaaacacauacccaucaac

SEQ ID NO: 3337 - RNA, 20 nt, Artificial Sequence
  LDLR targeting guide sequence portion
uuaaaccacuguauagaagg

SEQ ID NO: 3338 - RNA, 20 nt, Artificial Sequence
  LDLR targeting guide sequence portion
uuaagccaggaaagggauuc

SEQ ID NO: 3339 - RNA, 20 nt, Artificial Sequence
  LDLR targeting guide sequence portion
uuaaggaagguacaaaccca

SEQ ID NO: 3340 - RNA, 20 nt, Artificial Sequence
  LDLR targeting guide sequence portion
uuaagggugaccagugacuc

SEQ ID NO: 3341 - RNA, 20 nt, Artificial Sequence
  LDLR targeting guide sequence portion
uuaauaaauauuaaggguga

SEQ ID NO: 3342 - RNA, 20 nt, Artificial Sequence
  LDLR targeting guide sequence portion
uuaauugaucacaguaagac

SEQ ID NO: 3343 - RNA, 20 nt, Artificial Sequence
  LDLR targeting guide sequence portion
uuacaggcgugaggcaccug

SEQ ID NO: 3344 - RNA, 20 nt, Artificial Sequence
  LDLR targeting guide sequence portion
uuaccucuucuaugcaagcc

SEQ ID NO: 3345 - RNA, 20 nt, Artificial Sequence
  LDLR targeting guide sequence portion
uuaccuuggccgugaggaca

SEQ ID NO: 3346 - RNA, 20 nt, Artificial Sequence
  LDLR targeting guide sequence portion
uuacgugcuccgaaaccaga

SEQ ID NO: 3347 - RNA, 20 nt, Artificial Sequence
  LDLR targeting guide sequence portion
uuacuauguugcccaggcug

SEQ ID NO: 3348 - RNA, 20 nt, Artificial Sequence
  LDLR targeting guide sequence portion
uuacuguugcacugaugucc

SEQ ID NO: 3349 - RNA, 20 nt, Artificial Sequence
  LDLR targeting guide sequence portion
uuagagauugguggaugagg

SEQ ID NO: 3350 - RNA, 20 nt, Artificial Sequence
  LDLR targeting guide sequence portion
uuagccuuugcccugucacc

SEQ ID NO: 3351 - RNA, 20 nt, Artificial Sequence
  LDLR targeting guide sequence portion
uuagggguuuggcuuagaga

SEQ ID NO: 3352 - RNA, 20 nt, Artificial Sequence
  LDLR targeting guide sequence portion
uuauauauuuauucaucugg

SEQ ID NO: 3353 - RNA, 20 nt, Artificial Sequence
  LDLR targeting guide sequence portion
uuaucacgguucccugcacu

SEQ ID NO: 3354 - RNA, 20 nt, Artificial Sequence
  LDLR targeting guide sequence portion
uuauccuucacgaggaaagg

SEQ ID NO: 3355 - RNA, 20 nt, Artificial Sequence
  LDLR targeting guide sequence portion
uuaugccacugcuuuccagc

SEQ ID NO: 3356 - RNA, 20 nt, Artificial Sequence
  LDLR targeting guide sequence portion
uuauguccgcccaccuagug

SEQ ID NO: 3357 - RNA, 20 nt, Artificial Sequence
  LDLR targeting guide sequence portion
uuauuaagugccugagacac

SEQ ID NO: 3358 - RNA, 20 nt, Artificial Sequence
  LDLR targeting guide sequence portion
uuauuauuuugcacuguuuu

SEQ ID NO: 3359 - RNA, 20 nt, Artificial Sequence
  LDLR targeting guide sequence portion
uuauucaaagacagagaaga

SEQ ID NO: 3360 - RNA, 20 nt, Artificial Sequence
  LDLR targeting guide sequence portion
uuauucaucugggaggcaga

SEQ ID NO: 3361 - RNA, 20 nt, Artificial Sequence
  LDLR targeting guide sequence portion
uuauugccucugaaaugccu

SEQ ID NO: 3362 - RNA, 20 nt, Artificial Sequence
  LDLR targeting guide sequence portion
uuauuugcacgaacuggacu

SEQ ID NO: 3363 - RNA, 20 nt, Artificial Sequence
  LDLR targeting guide sequence portion
uuauuuugcacuguuuucug

SEQ ID NO: 3364 - RNA, 20 nt, Artificial Sequence
  LDLR targeting guide sequence portion
uuauuuuugcaaacccuggu

SEQ ID NO: 3365 - RNA, 20 nt, Artificial Sequence
  LDLR targeting guide sequence portion
uucaaagacagagaagacca

SEQ ID NO: 3366 - RNA, 20 nt, Artificial Sequence
  LDLR targeting guide sequence portion
uucaaagccgugaucgugaa

SEQ ID NO: 3367 - RNA, 20 nt, Artificial Sequence
  LDLR targeting guide sequence portion
uucaacacacaacagcagau

SEQ ID NO: 3368 - RNA, 20 nt, Artificial Sequence
  LDLR targeting guide sequence portion
uucaaccaauauacaaagug

SEQ ID NO: 3369 - RNA, 20 nt, Artificial Sequence
  LDLR targeting guide sequence portion
uucaccaaaugaugccacuu

SEQ ID NO: 3370 - RNA, 20 nt, Artificial Sequence
  LDLR targeting guide sequence portion
uucacgaggaaaggaagaaa

SEQ ID NO: 3371 - RNA, 20 nt, Artificial Sequence
  LDLR targeting guide sequence portion
uucacgaucacggcuuugaa

SEQ ID NO: 3372 - RNA, 20 nt, Artificial Sequence
  LDLR targeting guide sequence portion
uucacgccacgucauccucc

SEQ ID NO: 3373 - RNA, 20 nt, Artificial Sequence
  LDLR targeting guide sequence portion
uucacgcgggagucugacgg

SEQ ID NO: 3374 - RNA, 20 nt, Artificial Sequence
  LDLR targeting guide sequence portion
uucacuuccccaaucuuguc

SEQ ID NO: 3375 - RNA, 20 nt, Artificial Sequence
  LDLR targeting guide sequence portion
uucagaaagaaccugaaguc

SEQ ID NO: 3376 - RNA, 20 nt, Artificial Sequence
  LDLR targeting guide sequence portion
uucagaggcaauaacccccu

SEQ ID NO: 3377 - RNA, 20 nt, Artificial Sequence
  LDLR targeting guide sequence portion
uucagaguuguacacugugu

SEQ ID NO: 3378 - RNA, 20 nt, Artificial Sequence
  LDLR targeting guide sequence portion
uucagccagaucauuuccga

SEQ ID NO: 3379 - RNA, 20 nt, Artificial Sequence
  LDLR targeting guide sequence portion
uucaggaguuggagaccagg

SEQ ID NO: 3380 - RNA, 20 nt, Artificial Sequence
  LDLR targeting guide sequence portion
uucaggcuacaaaaaccuuc

SEQ ID NO: 3381 - RNA, 20 nt, Artificial Sequence
  LDLR targeting guide sequence portion
uucagguucuuucugaaauc

SEQ ID NO: 3382 - RNA, 20 nt, Artificial Sequence
  LDLR targeting guide sequence portion
uucagugacuauucucgggg

SEQ ID NO: 3383 - RNA, 20 nt, Artificial Sequence
  LDLR targeting guide sequence portion
uucaucugggaggcagaaca

SEQ ID NO: 3384 - RNA, 20 nt, Artificial Sequence
  LDLR targeting guide sequence portion
uucauggcgucggaaaugau

SEQ ID NO: 3385 - RNA, 20 nt, Artificial Sequence
  LDLR targeting guide sequence portion
uucauugacacgggcuuucc

SEQ ID NO: 3386 - RNA, 20 nt, Artificial Sequence
  LDLR targeting guide sequence portion
uucauuuuuuaagagauggg

SEQ ID NO: 3387 - RNA, 20 nt, Artificial Sequence
  LDLR targeting guide sequence portion
uuccacuucuaugcaaaugc

SEQ ID NO: 3388 - RNA, 20 nt, Artificial Sequence
  LDLR targeting guide sequence portion
uuccauguuugaggauugug

SEQ ID NO: 3389 - RNA, 20 nt, Artificial Sequence
  LDLR targeting guide sequence portion
uuccauucccguggucuccu

SEQ ID NO: 3390 - RNA, 20 nt, Artificial Sequence
  LDLR targeting guide sequence portion
uucccagaggcagagccuga

SEQ ID NO: 3391 - RNA, 20 nt, Artificial Sequence
  LDLR targeting guide sequence portion
uuccccaaucuugucguuga

SEQ ID NO: 3392 - RNA, 20 nt, Artificial Sequence
  LDLR targeting guide sequence portion
uucccuggccugggauccca

SEQ ID NO: 3393 - RNA, 20 nt, Artificial Sequence
  LDLR targeting guide sequence portion
uuccgacgccaugaaucccu

SEQ ID NO: 3394 - RNA, 20 nt, Artificial Sequence
  LDLR targeting guide sequence portion
uuccucgugaaggauaagag

SEQ ID NO: 3395 - RNA, 20 nt, Artificial Sequence
  LDLR targeting guide sequence portion
uuccugagaccucgccggcc

SEQ ID NO: 3396 - RNA, 20 nt, Artificial Sequence
  LDLR targeting guide sequence portion
uuccuggagagaaauggagg

SEQ ID NO: 3397 - RNA, 20 nt, Artificial Sequence
  LDLR targeting guide sequence portion
uuccuggcuuaaggaaggua

SEQ ID NO: 3398 - RNA, 20 nt, Artificial Sequence
  LDLR targeting guide sequence portion
uuccuuaagccaggaaaggg

SEQ ID NO: 3399 - RNA, 20 nt, Artificial Sequence
  LDLR targeting guide sequence portion
uuccuuuccucgugaaggau

SEQ ID NO: 3400 - RNA, 20 nt, Artificial Sequence
  LDLR targeting guide sequence portion
uucgagguggguuuguaccu

SEQ ID NO: 3401 - RNA, 20 nt, Artificial Sequence
  LDLR targeting guide sequence portion
uucggacagugcccaugcaa

SEQ ID NO: 3402 - RNA, 20 nt, Artificial Sequence
  LDLR targeting guide sequence portion
uucggagcacguaaaugcgu

SEQ ID NO: 3403 - RNA, 20 nt, Artificial Sequence
  LDLR targeting guide sequence portion
uucgggggugacagggcaaa

SEQ ID NO: 3404 - RNA, 20 nt, Artificial Sequence
  LDLR targeting guide sequence portion
uucuauacagugguuuaaaa

SEQ ID NO: 3405 - RNA, 20 nt, Artificial Sequence
  LDLR targeting guide sequence portion
uucuaugcaaaugccuccaa

SEQ ID NO: 3406 - RNA, 20 nt, Artificial Sequence
  LDLR targeting guide sequence portion
uucuaugcaagccuugcuag

SEQ ID NO: 3407 - RNA, 20 nt, Artificial Sequence
  LDLR targeting guide sequence portion
uucucaguucagaguuguac

SEQ ID NO: 3408 - RNA, 20 nt, Artificial Sequence
  LDLR targeting guide sequence portion
uucucccaaaaagcguugca

SEQ ID NO: 3409 - RNA, 20 nt, Artificial Sequence
  LDLR targeting guide sequence portion
uucucgauauucacgaucac

SEQ ID NO: 3410 - RNA, 20 nt, Artificial Sequence
  LDLR targeting guide sequence portion
uucucggggcccuguguagg

SEQ ID NO: 3411 - RNA, 20 nt, Artificial Sequence
  LDLR targeting guide sequence portion
uucucuccaccgugacacaa

SEQ ID NO: 3412 - RNA, 20 nt, Artificial Sequence
  LDLR targeting guide sequence portion
uucucuccaggaaguuuuga

SEQ ID NO: 3413 - RNA, 20 nt, Artificial Sequence
  LDLR targeting guide sequence portion
uucucugggccugacauccc

SEQ ID NO: 3414 - RNA, 20 nt, Artificial Sequence
  LDLR targeting guide sequence portion
uucucugucuuugaauaaaa

SEQ ID NO: 3415 - RNA, 20 nt, Artificial Sequence
  LDLR targeting guide sequence portion
uucucuuauccuucacgagg

SEQ ID NO: 3416 - RNA, 20 nt, Artificial Sequence
  LDLR targeting guide sequence portion
uucugaaauagggucuucau

SEQ ID NO: 3417 - RNA, 20 nt, Artificial Sequence
  LDLR targeting guide sequence portion
uucugaaaucgccguguuac

SEQ ID NO: 3418 - RNA, 20 nt, Artificial Sequence
  LDLR targeting guide sequence portion
uucugccucccagaugaaua

SEQ ID NO: 3419 - RNA, 20 nt, Artificial Sequence
  LDLR targeting guide sequence portion
uucugggagaugggugucac

SEQ ID NO: 3420 - RNA, 20 nt, Artificial Sequence
  LDLR targeting guide sequence portion
uucugggcagggacgggacu

SEQ ID NO: 3421 - RNA, 20 nt, Artificial Sequence
  LDLR targeting guide sequence portion
uucugguuucggagcacgua

SEQ ID NO: 3422 - RNA, 20 nt, Artificial Sequence
  LDLR targeting guide sequence portion
uucugucguguguguuggga

SEQ ID NO: 3423 - RNA, 20 nt, Artificial Sequence
  LDLR targeting guide sequence portion
uucuuccuuuccucgugaag

SEQ ID NO: 3424 - RNA, 20 nt, Artificial Sequence
  LDLR targeting guide sequence portion
uucuuucugaaaucgccgug

SEQ ID NO: 3425 - RNA, 20 nt, Artificial Sequence
  LDLR targeting guide sequence portion
uugaaagccacuugcuucuc

SEQ ID NO: 3426 - RNA, 20 nt, Artificial Sequence
  LDLR targeting guide sequence portion
uugaagucccggucaaccug

SEQ ID NO: 3427 - RNA, 20 nt, Artificial Sequence
  LDLR targeting guide sequence portion
uugaauaaaacaaggccggc

SEQ ID NO: 3428 - RNA, 20 nt, Artificial Sequence
  LDLR targeting guide sequence portion
uugacacgggcuuucccugg

SEQ ID NO: 3429 - RNA, 20 nt, Artificial Sequence
  LDLR targeting guide sequence portion
uugaccgggacuucaaagcc

SEQ ID NO: 3430 - RNA, 20 nt, Artificial Sequence
  LDLR targeting guide sequence portion
uugacgggacuucagguucu

SEQ ID NO: 3431 - RNA, 20 nt, Artificial Sequence
  LDLR targeting guide sequence portion
uugacuccugaguuuagggg

SEQ ID NO: 3432 - RNA, 20 nt, Artificial Sequence
  LDLR targeting guide sequence portion
uugagcucaggcauuugagg

SEQ ID NO: 3433 - RNA, 20 nt, Artificial Sequence
  LDLR targeting guide sequence portion
uugaggauugugucacggug

SEQ ID NO: 3434 - RNA, 20 nt, Artificial Sequence
  LDLR targeting guide sequence portion
uugaggcugucgugagcuau

SEQ ID NO: 3435 - RNA, 20 nt, Artificial Sequence
  LDLR targeting guide sequence portion
uugaguuucucuccaccgug

SEQ ID NO: 3436 - RNA, 20 nt, Artificial Sequence
  LDLR targeting guide sequence portion
uugaucacaguaagacauuc

SEQ ID NO: 3437 - RNA, 20 nt, Artificial Sequence
  LDLR targeting guide sequence portion
uugauggguauguguuuaaa

SEQ ID NO: 3438 - RNA, 20 nt, Artificial Sequence
  LDLR targeting guide sequence portion
uugcaaacccugguugcugu

SEQ ID NO: 3439 - RNA, 20 nt, Artificial Sequence
  LDLR targeting guide sequence portion
uugcacacaguccaguucgu

SEQ ID NO: 3440 - RNA, 20 nt, Artificial Sequence
  LDLR targeting guide sequence portion
uugcacgaacuggacugugu

SEQ ID NO: 3441 - RNA, 20 nt, Artificial Sequence
  LDLR targeting guide sequence portion
uugcacugauguccggagag

SEQ ID NO: 3442 - RNA, 20 nt, Artificial Sequence
  LDLR targeting guide sequence portion
uugcacuuucucaguucaga

SEQ ID NO: 3443 - RNA, 20 nt, Artificial Sequence
  LDLR targeting guide sequence portion
uugcacuuuguauauugguu

SEQ ID NO: 3444 - RNA, 20 nt, Artificial Sequence
  LDLR targeting guide sequence portion
uugcauagaagagguaaaca

SEQ ID NO: 3445 - RNA, 20 nt, Artificial Sequence
  LDLR targeting guide sequence portion
uugcauagaaguggaagcac

SEQ ID NO: 3446 - RNA, 20 nt, Artificial Sequence
  LDLR targeting guide sequence portion
uugcaugggcacuguccgaa

SEQ ID NO: 3447 - RNA, 20 nt, Artificial Sequence
  LDLR targeting guide sequence portion
uugccaaucccuugugacau

SEQ ID NO: 3448 - RNA, 20 nt, Artificial Sequence
  LDLR targeting guide sequence portion
uugcccugucacccccgaau

SEQ ID NO: 3449 - RNA, 20 nt, Artificial Sequence
  LDLR targeting guide sequence portion
uugccucugaaaugccucuu

SEQ ID NO: 3450 - RNA, 20 nt, Artificial Sequence
  LDLR targeting guide sequence portion
uugccugccagagcuuuguu

SEQ ID NO: 3451 - RNA, 20 nt, Artificial Sequence
  LDLR targeting guide sequence portion
uugcuagacagccagguuag

SEQ ID NO: 3452 - RNA, 20 nt, Artificial Sequence
  LDLR targeting guide sequence portion
uugcucaggccuggucucca

SEQ ID NO: 3453 - RNA, 20 nt, Artificial Sequence
  LDLR targeting guide sequence portion
uugcuguauuuguucaguga

SEQ ID NO: 3454 - RNA, 20 nt, Artificial Sequence
  LDLR targeting guide sequence portion
uugcuucucugggccugaca

SEQ ID NO: 3455 - RNA, 20 nt, Artificial Sequence
  LDLR targeting guide sequence portion
uuggagaccaggccugagca

SEQ ID NO: 3456 - RNA, 20 nt, Artificial Sequence
  LDLR targeting guide sequence portion
uuggaggcauuugcauagaa

SEQ ID NO: 3457 - RNA, 20 nt, Artificial Sequence
  LDLR targeting guide sequence portion
uuggcaauuguccccaggga

SEQ ID NO: 3458 - RNA, 20 nt, Artificial Sequence
  LDLR targeting guide sequence portion
uuggcauuuguguuauuauu

SEQ ID NO: 3459 - RNA, 20 nt, Artificial Sequence
  LDLR targeting guide sequence portion
uuggccagacacaggugccu

SEQ ID NO: 3460 - RNA, 20 nt, Artificial Sequence
  LDLR targeting guide sequence portion
uuggccgugaggacacgugg

SEQ ID NO: 3461 - RNA, 20 nt, Artificial Sequence
  LDLR targeting guide sequence portion
uuggcuuagagauuggugga

SEQ ID NO: 3462 - RNA, 20 nt, Artificial Sequence
  LDLR targeting guide sequence portion
uugggagaaugauguccccg

SEQ ID NO: 3463 - RNA, 20 nt, Artificial Sequence
  LDLR targeting guide sequence portion
uugggaggcugagcuggauc

SEQ ID NO: 3464 - RNA, 20 nt, Artificial Sequence
  LDLR targeting guide sequence portion
uugggaugggaucccaggcc

SEQ ID NO: 3465 - RNA, 20 nt, Artificial Sequence
  LDLR targeting guide sequence portion
uugggauuuugguuucuucc

SEQ ID NO: 3466 - RNA, 20 nt, Artificial Sequence
  LDLR targeting guide sequence portion
uuggggaagugaauggcuug

SEQ ID NO: 3467 - RNA, 20 nt, Artificial Sequence
  LDLR targeting guide sequence portion
uuggguugggauuuugguuu

SEQ ID NO: 3468 - RNA, 20 nt, Artificial Sequence
  LDLR targeting guide sequence portion
uuggucucggugccaccacg

SEQ ID NO: 3469 - RNA, 20 nt, Artificial Sequence
  LDLR targeting guide sequence portion
uuggucuucucugucuuuga

SEQ ID NO: 3470 - RNA, 20 nt, Artificial Sequence
  LDLR targeting guide sequence portion
uuggugaaugaguuuggucu

SEQ ID NO: 3471 - RNA, 20 nt, Artificial Sequence
  LDLR targeting guide sequence portion
uuggugccaucugcuguugu

SEQ ID NO: 3472 - RNA, 20 nt, Artificial Sequence
  LDLR targeting guide sequence portion
uugguggaugaggcagggcc

SEQ ID NO: 3473 - RNA, 20 nt, Artificial Sequence
  LDLR targeting guide sequence portion
uugguuucuuccuuuccucg

SEQ ID NO: 3474 - RNA, 20 nt, Artificial Sequence
  LDLR targeting guide sequence portion
uugguuuuuguagagauggg

SEQ ID NO: 3475 - RNA, 20 nt, Artificial Sequence
  LDLR targeting guide sequence portion
uuguacacuguguacauuug

SEQ ID NO: 3476 - RNA, 20 nt, Artificial Sequence
  LDLR targeting guide sequence portion
uuguacauaaagaagaggca

SEQ ID NO: 3477 - RNA, 20 nt, Artificial Sequence
  LDLR targeting guide sequence portion
uuguaccuuccuuaagccag

SEQ ID NO: 3478 - RNA, 20 nt, Artificial Sequence
  LDLR targeting guide sequence portion
uuguagccugaaugucuuac

SEQ ID NO: 3479 - RNA, 20 nt, Artificial Sequence
  LDLR targeting guide sequence portion
uuguauguaugaguggcuuc

SEQ ID NO: 3480 - RNA, 20 nt, Artificial Sequence
  LDLR targeting guide sequence portion
uuguauuucugaaauagggu

SEQ ID NO: 3481 - RNA, 20 nt, Artificial Sequence
  LDLR targeting guide sequence portion
uuguccccagggacaaaaca

SEQ ID NO: 3482 - RNA, 20 nt, Artificial Sequence
  LDLR targeting guide sequence portion
uugucccuggggacaauugc

SEQ ID NO: 3483 - RNA, 20 nt, Artificial Sequence
  LDLR targeting guide sequence portion
uugucgucuuuauguccgcc

SEQ ID NO: 3484 - RNA, 20 nt, Artificial Sequence
  LDLR targeting guide sequence portion
uugucguugauggguaugug

SEQ ID NO: 3485 - RNA, 20 nt, Artificial Sequence
  LDLR targeting guide sequence portion
uugugacaucuucacgcggg

SEQ ID NO: 3486 - RNA, 20 nt, Artificial Sequence
  LDLR targeting guide sequence portion
uugugucacgguggagagaa

SEQ ID NO: 3487 - RNA, 20 nt, Artificial Sequence
  LDLR targeting guide sequence portion
uuguguguugaaagccacuu

SEQ ID NO: 3488 - RNA, 20 nt, Artificial Sequence
  LDLR targeting guide sequence portion
uuguucagugacuauucucg

SEQ ID NO: 3489 - RNA, 20 nt, Artificial Sequence
  LDLR targeting guide sequence portion
uuguugcucaggccuggucu

SEQ ID NO: 3490 - RNA, 20 nt, Artificial Sequence
  LDLR targeting guide sequence portion
uuguuuuauucaaagacaga

SEQ ID NO: 3491 - RNA, 20 nt, Artificial Sequence
  LDLR targeting guide sequence portion
uuuaaaaagugacacccauc

SEQ ID NO: 3492 - RNA, 20 nt, Artificial Sequence
  LDLR targeting guide sequence portion
uuuaaaacaugcacggugag

SEQ ID NO: 3493 - RNA, 20 nt, Artificial Sequence
  LDLR targeting guide sequence portion
uuuaaacacauacccaucaa

SEQ ID NO: 3494 - RNA, 20 nt, Artificial Sequence
  LDLR targeting guide sequence portion
uuuaccucuucuaugcaagc

SEQ ID NO: 3495 - RNA, 20 nt, Artificial Sequence
  LDLR targeting guide sequence portion
uuuacgugcuccgaaaccag

SEQ ID NO: 3496 - RNA, 20 nt, Artificial Sequence
  LDLR targeting guide sequence portion
uuuagggguuuggcuuagag

SEQ ID NO: 3497 - RNA, 20 nt, Artificial Sequence
  LDLR targeting guide sequence portion
uuuauauauuuauucaucug

SEQ ID NO: 3498 - RNA, 20 nt, Artificial Sequence
  LDLR targeting guide sequence portion
uuuauguccgcccaccuagu

SEQ ID NO: 3499 - RNA, 20 nt, Artificial Sequence
  LDLR targeting guide sequence portion
uuuauuaagugccugagaca

SEQ ID NO: 3500 - RNA, 20 nt, Artificial Sequence
  LDLR targeting guide sequence portion
uuuauucaaagacagagaag

SEQ ID NO: 3501 - RNA, 20 nt, Artificial Sequence
  LDLR targeting guide sequence portion
uuuauucaucugggaggcag

SEQ ID NO: 3502 - RNA, 20 nt, Artificial Sequence
  LDLR targeting guide sequence portion
uuuauuuuugcaaacccugg

SEQ ID NO: 3503 - RNA, 20 nt, Artificial Sequence
  LDLR targeting guide sequence portion
uuucaacacacaacagcaga

SEQ ID NO: 3504 - RNA, 20 nt, Artificial Sequence
  LDLR targeting guide sequence portion
uuucaaccaauauacaaagu

SEQ ID NO: 3505 - RNA, 20 nt, Artificial Sequence
  LDLR targeting guide sequence portion
uuucagaaagaaccugaagu

SEQ ID NO: 3506 - RNA, 20 nt, Artificial Sequence
  LDLR targeting guide sequence portion
uuucagaggcaauaaccccc

SEQ ID NO: 3507 - RNA, 20 nt, Artificial Sequence
  LDLR targeting guide sequence portion
uuucaucuuccauguuugag

SEQ ID NO: 3508 - RNA, 20 nt, Artificial Sequence
  LDLR targeting guide sequence portion
uuucccuggccugggauccc

SEQ ID NO: 3509 - RNA, 20 nt, Artificial Sequence
  LDLR targeting guide sequence portion
uuuccgacgccaugaauccc

SEQ ID NO: 3510 - RNA, 20 nt, Artificial Sequence
  LDLR targeting guide sequence portion
uuuccucgugaaggauaaga

SEQ ID NO: 3511 - RNA, 20 nt, Artificial Sequence
  LDLR targeting guide sequence portion
uuuccuggcuuaaggaaggu

SEQ ID NO: 3512 - RNA, 20 nt, Artificial Sequence
  LDLR targeting guide sequence portion
uuucgagguggguuuguacc

SEQ ID NO: 3513 - RNA, 20 nt, Artificial Sequence
  LDLR targeting guide sequence portion
uuucggagcacguaaaugcg

SEQ ID NO: 3514 - RNA, 20 nt, Artificial Sequence
  LDLR targeting guide sequence portion
uuucucaguucagaguugua

SEQ ID NO: 3515 - RNA, 20 nt, Artificial Sequence
  LDLR targeting guide sequence portion
uuucucuccaccgugacaca

SEQ ID NO: 3516 - RNA, 20 nt, Artificial Sequence
  LDLR targeting guide sequence portion
uuucucuccaggaaguuuug

SEQ ID NO: 3517 - RNA, 20 nt, Artificial Sequence
  LDLR targeting guide sequence portion
uuucucuuauccuucacgag

SEQ ID NO: 3518 - RNA, 20 nt, Artificial Sequence
  LDLR targeting guide sequence portion
uuucugaaauagggucuuca

SEQ ID NO: 3519 - RNA, 20 nt, Artificial Sequence
  LDLR targeting guide sequence portion
uuucugaaaucgccguguua

SEQ ID NO: 3520 - RNA, 20 nt, Artificial Sequence
  LDLR targeting guide sequence portion
uuucugguuucggagcacgu

SEQ ID NO: 3521 - RNA, 20 nt, Artificial Sequence
  LDLR targeting guide sequence portion
uuucugucguguguguuggg

SEQ ID NO: 3522 - RNA, 20 nt, Artificial Sequence
  LDLR targeting guide sequence portion
uuucuuccuuuccucgugaa

SEQ ID NO: 3523 - RNA, 20 nt, Artificial Sequence
  LDLR targeting guide sequence portion
uuugaagucccggucaaccu

SEQ ID NO: 3524 - RNA, 20 nt, Artificial Sequence
  LDLR targeting guide sequence portion
uuugaauaaaacaaggccgg

SEQ ID NO: 3525 - RNA, 20 nt, Artificial Sequence
  LDLR targeting guide sequence portion
uuugacgggacuucagguuc

SEQ ID NO: 3526 - RNA, 20 nt, Artificial Sequence
  LDLR targeting guide sequence portion
uuugagcucaggcauuugag

SEQ ID NO: 3527 - RNA, 20 nt, Artificial Sequence
  LDLR targeting guide sequence portion
uuugaggauugugucacggu

SEQ ID NO: 3528 - RNA, 20 nt, Artificial Sequence
  LDLR targeting guide sequence portion
uuugaggcugucgugagcua

SEQ ID NO: 3529 - RNA, 20 nt, Artificial Sequence
  LDLR targeting guide sequence portion
uuugaguuucucuccaccgu

SEQ ID NO: 3530 - RNA, 20 nt, Artificial Sequence
  LDLR targeting guide sequence portion
uuugcaaacccugguugcug

SEQ ID NO: 3531 - RNA, 20 nt, Artificial Sequence
  LDLR targeting guide sequence portion
uuugcacgaacuggacugug

SEQ ID NO: 3532 - RNA, 20 nt, Artificial Sequence
  LDLR targeting guide sequence portion
uuugcacuguuuucugucgu

SEQ ID NO: 3533 - RNA, 20 nt, Artificial Sequence
  LDLR targeting guide sequence portion
uuugcacuuuguauauuggu

SEQ ID NO: 3534 - RNA, 20 nt, Artificial Sequence
  LDLR targeting guide sequence portion
uuugcauagaaguggaagca

SEQ ID NO: 3535 - RNA, 20 nt, Artificial Sequence
  LDLR targeting guide sequence portion
uuugcccugucacccccgaa

SEQ ID NO: 3536 - RNA, 20 nt, Artificial Sequence
  LDLR targeting guide sequence portion
uuuggccagacacaggugcc

SEQ ID NO: 3537 - RNA, 20 nt, Artificial Sequence
  LDLR targeting guide sequence portion
uuuggcuuagagauuggugg

SEQ ID NO: 3538 - RNA, 20 nt, Artificial Sequence
  LDLR targeting guide sequence portion
uuugggagaaugaugucccc

SEQ ID NO: 3539 - RNA, 20 nt, Artificial Sequence
  LDLR targeting guide sequence portion
uuugggaggcugagcuggau

SEQ ID NO: 3540 - RNA, 20 nt, Artificial Sequence
  LDLR targeting guide sequence portion
uuuggucucggugccaccac

SEQ ID NO: 3541 - RNA, 20 nt, Artificial Sequence
  LDLR targeting guide sequence portion
uuuggucuucucugucuuug

SEQ ID NO: 3542 - RNA, 20 nt, Artificial Sequence
  LDLR targeting guide sequence portion
uuuggugaaugaguuugguc

SEQ ID NO: 3543 - RNA, 20 nt, Artificial Sequence
  LDLR targeting guide sequence portion
uuugguuucuuccuuuccuc

SEQ ID NO: 3544 - RNA, 20 nt, Artificial Sequence
  LDLR targeting guide sequence portion
uuuguacauaaagaagaggc

SEQ ID NO: 3545 - RNA, 20 nt, Artificial Sequence
  LDLR targeting guide sequence portion
uuuguaccuuccuuaagcca

SEQ ID NO: 3546 - RNA, 20 nt, Artificial Sequence
  LDLR targeting guide sequence portion
uuuguagccugaaugucuua

SEQ ID NO: 3547 - RNA, 20 nt, Artificial Sequence
  LDLR targeting guide sequence portion
uuugucccuggggacaauug

SEQ ID NO: 3548 - RNA, 20 nt, Artificial Sequence
  LDLR targeting guide sequence portion
uuuguucagugacuauucuc

SEQ ID NO: 3549 - RNA, 20 nt, Artificial Sequence
  LDLR targeting guide sequence portion
uuuguugcucaggccugguc

SEQ ID NO: 3550 - RNA, 20 nt, Artificial Sequence
  LDLR targeting guide sequence portion
uuuuaaacacauacccauca

SEQ ID NO: 3551 - RNA, 20 nt, Artificial Sequence
  LDLR targeting guide sequence portion
uuuuauucaaagacagagaa

SEQ ID NO: 3552 - RNA, 20 nt, Artificial Sequence
  LDLR targeting guide sequence portion
uuuucugucguguguguugg

SEQ ID NO: 3553 - RNA, 20 nt, Artificial Sequence
  LDLR targeting guide sequence portion
uuuugaguuucucuccaccg

SEQ ID NO: 3554 - RNA, 20 nt, Artificial Sequence
  LDLR targeting guide sequence portion
uuuugcaaacccugguugcu

SEQ ID NO: 3555 - RNA, 20 nt, Artificial Sequence
  LDLR targeting guide sequence portion
uuuugcacuguuuucugucg

SEQ ID NO: 3556 - RNA, 20 nt, Artificial Sequence
  LDLR targeting guide sequence portion
uuuugggagaaugauguccc

SEQ ID NO: 3557 - RNA, 20 nt, Artificial Sequence
  LDLR targeting guide sequence portion
uuuugguuucuuccuuuccu

SEQ ID NO: 3558 - RNA, 20 nt, Artificial Sequence
  LDLR targeting guide sequence portion
uuuugguuuuuguagagaug

SEQ ID NO: 3559 - RNA, 20 nt, Artificial Sequence
  LDLR targeting guide sequence portion
uuuuguagccugaaugucuu

SEQ ID NO: 3560 - RNA, 20 nt, Artificial Sequence
  LDLR targeting guide sequence portion
uuuugucccuggggacaauu

SEQ ID NO: 3561 - RNA, 20 nt, Artificial Sequence
  LDLR targeting guide sequence portion
uuuuugcaaacccugguugc

SEQ ID NO: 3562 - RNA, 20 nt, Artificial Sequence
  LDLR targeting guide sequence portion
uuuuugggagaaugaugucc

SEQ ID NO: 3563 - RNA, 20 nt, Artificial Sequence
  LDLR targeting guide sequence portion
uuuuugguuuuuguagagau

SEQ ID NO: 3564 - RNA, 20 nt, Artificial Sequence
  LDLR targeting guide sequence portion
uuuuuguagccugaaugucu

SEQ ID NO: 3565 - RNA, 21 nt, Artificial Sequence
  LDLR targeting guide sequence portion
aaaaaaccaugcauggugcau

SEQ ID NO: 3566 - RNA, 21 nt, Artificial Sequence
  LDLR targeting guide sequence portion
aaaaaauccccacuaucugua

SEQ ID NO: 3567 - RNA, 21 nt, Artificial Sequence
  LDLR targeting guide sequence portion
aaaaaaugaauuuggccagac

SEQ ID NO: 3568 - RNA, 21 nt, Artificial Sequence
  LDLR targeting guide sequence portion
aaaaaccaugcauggugcauc

SEQ ID NO: 3569 - RNA, 21 nt, Artificial Sequence
  LDLR targeting guide sequence portion
aaaaagcguugcacacagucc

SEQ ID NO: 3570 - RNA, 21 nt, Artificial Sequence
  LDLR targeting guide sequence portion
aaaaagugacacccaucuccc

SEQ ID NO: 3571 - RNA, 21 nt, Artificial Sequence
  LDLR targeting guide sequence portion
aaaaaguuaaaaaucagcugg

SEQ ID NO: 3572 - RNA, 21 nt, Artificial Sequence
  LDLR targeting guide sequence portion
aaaaaucagcuggguacggug

SEQ ID NO: 3573 - RNA, 21 nt, Artificial Sequence
  LDLR targeting guide sequence portion
aaaaauccccacuaucuguac

SEQ ID NO: 3574 - RNA, 21 nt, Artificial Sequence
  LDLR targeting guide sequence portion
aaaaaugaauuuggccagaca

SEQ ID NO: 3575 - RNA, 21 nt, Artificial Sequence
  LDLR targeting guide sequence portion
aaaacaaagcucuggcaggca

SEQ ID NO: 3576 - RNA, 21 nt, Artificial Sequence
  LDLR targeting guide sequence portion
aaaacaaggccggcgaggucu

SEQ ID NO: 3577 - RNA, 21 nt, Artificial Sequence
  LDLR targeting guide sequence portion
aaaacaugcacggugaggccg

SEQ ID NO: 3578 - RNA, 21 nt, Artificial Sequence
  LDLR targeting guide sequence portion
aaaaccaugcauggugcauca

SEQ ID NO: 3579 - RNA, 21 nt, Artificial Sequence
  LDLR targeting guide sequence portion
aaaacuuccuggagagaaaug

SEQ ID NO: 3580 - RNA, 21 nt, Artificial Sequence
  LDLR targeting guide sequence portion
aaaagcguugcacacagucca

SEQ ID NO: 3581 - RNA, 21 nt, Artificial Sequence
  LDLR targeting guide sequence portion
aaaagugacacccaucuccca

SEQ ID NO: 3582 - RNA, 21 nt, Artificial Sequence
  LDLR targeting guide sequence portion
aaaaguuaaaaaucagcuggg

SEQ ID NO: 3583 - RNA, 21 nt, Artificial Sequence
  LDLR targeting guide sequence portion
aaaaucagcuggguacggugg

SEQ ID NO: 3584 - RNA, 21 nt, Artificial Sequence
  LDLR targeting guide sequence portion
aaaaucccaacccaagccauu

SEQ ID NO: 3585 - RNA, 21 nt, Artificial Sequence
  LDLR targeting guide sequence portion
aaaauccccacuaucuguaca

SEQ ID NO: 3586 - RNA, 21 nt, Artificial Sequence
  LDLR targeting guide sequence portion
aaaaugaauuuggccagacac

SEQ ID NO: 3587 - RNA, 21 nt, Artificial Sequence
  LDLR targeting guide sequence portion
aaacaaagcucuggcaggcaa

SEQ ID NO: 3588 - RNA, 21 nt, Artificial Sequence
  LDLR targeting guide sequence portion
aaacaaggccggcgaggucuc

SEQ ID NO: 3589 - RNA, 21 nt, Artificial Sequence
  LDLR targeting guide sequence portion
aaacacauacccaucaacgac

SEQ ID NO: 3590 - RNA, 21 nt, Artificial Sequence
  LDLR targeting guide sequence portion
aaacacguugacuccugaguu

SEQ ID NO: 3591 - RNA, 21 nt, Artificial Sequence
  LDLR targeting guide sequence portion
aaacaggcccggggggaccag

SEQ ID NO: 3592 - RNA, 21 nt, Artificial Sequence
  LDLR targeting guide sequence portion
aaacaugcacggugaggccgg

SEQ ID NO: 3593 - RNA, 21 nt, Artificial Sequence
  LDLR targeting guide sequence portion
aaacauggaagaugaaagggg

SEQ ID NO: 3594 - RNA, 21 nt, Artificial Sequence
  LDLR targeting guide sequence portion
aaaccaaaaaguuaaaaauca

SEQ ID NO: 3595 - RNA, 21 nt, Artificial Sequence
  LDLR targeting guide sequence portion
aaaccaaaaucccaacccaag

SEQ ID NO: 3596 - RNA, 21 nt, Artificial Sequence
  LDLR targeting guide sequence portion
aaaccacuguauagaagguuu

SEQ ID NO: 3597 - RNA, 21 nt, Artificial Sequence
  LDLR targeting guide sequence portion
aaaccagaaaggcuuaucacg

SEQ ID NO: 3598 - RNA, 21 nt, Artificial Sequence
  LDLR targeting guide sequence portion
aaaccauccucccaccucagc

SEQ ID NO: 3599 - RNA, 21 nt, Artificial Sequence
  LDLR targeting guide sequence portion
aaaccaugcauggugcaucag

SEQ ID NO: 3600 - RNA, 21 nt, Artificial Sequence
  LDLR targeting guide sequence portion
aaacccaccucgaaagacacu

SEQ ID NO: 3601 - RNA, 21 nt, Artificial Sequence
  LDLR targeting guide sequence portion
aaaccccuaaacucaggaguc

SEQ ID NO: 3602 - RNA, 21 nt, Artificial Sequence
  LDLR targeting guide sequence portion
aaacccugguugcuguauuug

SEQ ID NO: 3603 - RNA, 21 nt, Artificial Sequence
  LDLR targeting guide sequence portion
aaacgauccagacuggaggau

SEQ ID NO: 3604 - RNA, 21 nt, Artificial Sequence
  LDLR targeting guide sequence portion
aaacucaaaacuuccuggaga

SEQ ID NO: 3605 - RNA, 21 nt, Artificial Sequence
  LDLR targeting guide sequence portion
aaacucaggagucaacguguu

SEQ ID NO: 3606 - RNA, 21 nt, Artificial Sequence
  LDLR targeting guide sequence portion
aaacucauucaccaaaugaug

SEQ ID NO: 3607 - RNA, 21 nt, Artificial Sequence
  LDLR targeting guide sequence portion
aaacuuccuggagagaaaugg

SEQ ID NO: 3608 - RNA, 21 nt, Artificial Sequence
  LDLR targeting guide sequence portion
aaagaaccugaagucccguca

SEQ ID NO: 3609 - RNA, 21 nt, Artificial Sequence
  LDLR targeting guide sequence portion
aaagaagaggcauuucagagg

SEQ ID NO: 3610 - RNA, 21 nt, Artificial Sequence
  LDLR targeting guide sequence portion
aaagacacugggugggucaug

SEQ ID NO: 3611 - RNA, 21 nt, Artificial Sequence
  LDLR targeting guide sequence portion
aaagacagagaagaccaaagc

SEQ ID NO: 3612 - RNA, 21 nt, Artificial Sequence
  LDLR targeting guide sequence portion
aaagacgacaauggcaguucu

SEQ ID NO: 3613 - RNA, 21 nt, Artificial Sequence
  LDLR targeting guide sequence portion
aaagauuauuugcacgaacug

SEQ ID NO: 3614 - RNA, 21 nt, Artificial Sequence
  LDLR targeting guide sequence portion
aaagcaguggcauaaucauag

SEQ ID NO: 3615 - RNA, 21 nt, Artificial Sequence
  LDLR targeting guide sequence portion
aaagcauugccugccagagcu

SEQ ID NO: 3616 - RNA, 21 nt, Artificial Sequence
  LDLR targeting guide sequence portion
aaagccacuugcuucucuggg

SEQ ID NO: 3617 - RNA, 21 nt, Artificial Sequence
  LDLR targeting guide sequence portion
aaagcccgugucaaugaaugc

SEQ ID NO: 3618 - RNA, 21 nt, Artificial Sequence
  LDLR targeting guide sequence portion
aaagccgugaucgugaauauc

SEQ ID NO: 3619 - RNA, 21 nt, Artificial Sequence
  LDLR targeting guide sequence portion
aaagcgagaucccaucucuac

SEQ ID NO: 3620 - RNA, 21 nt, Artificial Sequence
  LDLR targeting guide sequence portion
aaagcguugcacacaguccag

SEQ ID NO: 3621 - RNA, 21 nt, Artificial Sequence
  LDLR targeting guide sequence portion
aaagcucuggcaggcaaugcu

SEQ ID NO: 3622 - RNA, 21 nt, Artificial Sequence
  LDLR targeting guide sequence portion
aaaggaagaaaccaaaauccc

SEQ ID NO: 3623 - RNA, 21 nt, Artificial Sequence
  LDLR targeting guide sequence portion
aaaggcuaaccuggcugucua

SEQ ID NO: 3624 - RNA, 21 nt, Artificial Sequence
  LDLR targeting guide sequence portion
aaaggcuuaucacgguucccu

SEQ ID NO: 3625 - RNA, 21 nt, Artificial Sequence
  LDLR targeting guide sequence portion
aaagggauucauggcgucgga

SEQ ID NO: 3626 - RNA, 21 nt, Artificial Sequence
  LDLR targeting guide sequence portion
aaaggggaggggaugucaggc

SEQ ID NO: 3627 - RNA, 21 nt, Artificial Sequence
  LDLR targeting guide sequence portion
aaagugacacccaucucccag

SEQ ID NO: 3628 - RNA, 21 nt, Artificial Sequence
  LDLR targeting guide sequence portion
aaagugcaaacauaacaaaaa

SEQ ID NO: 3629 - RNA, 21 nt, Artificial Sequence
  LDLR targeting guide sequence portion
aaagugcaaggagaccacggg

SEQ ID NO: 3630 - RNA, 21 nt, Artificial Sequence
  LDLR targeting guide sequence portion
aaaguuaaaaaucagcugggu

SEQ ID NO: 3631 - RNA, 21 nt, Artificial Sequence
  LDLR targeting guide sequence portion
aaauaaauaaauccuccaguc

SEQ ID NO: 3632 - RNA, 21 nt, Artificial Sequence
  LDLR targeting guide sequence portion
aaauaaauccuccagucugga

SEQ ID NO: 3633 - RNA, 21 nt, Artificial Sequence
  LDLR targeting guide sequence portion
aaauacagcaaccaggguuug

SEQ ID NO: 3634 - RNA, 21 nt, Artificial Sequence
  LDLR targeting guide sequence portion
aaauauauaaaacaaagcucu

SEQ ID NO: 3635 - RNA, 21 nt, Artificial Sequence
  LDLR targeting guide sequence portion
aaauauuaagggugaccagug

SEQ ID NO: 3636 - RNA, 21 nt, Artificial Sequence
  LDLR targeting guide sequence portion
aaaucagcuggguacgguggc

SEQ ID NO: 3637 - RNA, 21 nt, Artificial Sequence
  LDLR targeting guide sequence portion
aaaucccaacccaagccauug

SEQ ID NO: 3638 - RNA, 21 nt, Artificial Sequence
  LDLR targeting guide sequence portion
aaauccccacuaucuguacag

SEQ ID NO: 3639 - RNA, 21 nt, Artificial Sequence
  LDLR targeting guide sequence portion
aaauccuccagucuggaucgu

SEQ ID NO: 3640 - RNA, 21 nt, Artificial Sequence
  LDLR targeting guide sequence portion
aaaucgccguguuacuguugc

SEQ ID NO: 3641 - RNA, 21 nt, Artificial Sequence
  LDLR targeting guide sequence portion
aaaugaauuuggccagacaca

SEQ ID NO: 3642 - RNA, 21 nt, Artificial Sequence
  LDLR targeting guide sequence portion
aaaugaucuggcugaauccgu

SEQ ID NO: 3643 - RNA, 21 nt, Artificial Sequence
  LDLR targeting guide sequence portion
aaaugaugccacuucccagag

SEQ ID NO: 3644 - RNA, 21 nt, Artificial Sequence
  LDLR targeting guide sequence portion
aaaugccaaauguacacagug

SEQ ID NO: 3645 - RNA, 21 nt, Artificial Sequence
  LDLR targeting guide sequence portion
aaaugccuccaagccauucac

SEQ ID NO: 3646 - RNA, 21 nt, Artificial Sequence
  LDLR targeting guide sequence portion
aaaugccugagcucaaaccau

SEQ ID NO: 3647 - RNA, 21 nt, Artificial Sequence
  LDLR targeting guide sequence portion
aaaugcgucccuguacagaua

SEQ ID NO: 3648 - RNA, 21 nt, Artificial Sequence
  LDLR targeting guide sequence portion
aaauggaggugucauccuggu

SEQ ID NO: 3649 - RNA, 21 nt, Artificial Sequence
  LDLR targeting guide sequence portion
aaauguacacaguguacaacu

SEQ ID NO: 3650 - RNA, 21 nt, Artificial Sequence
  LDLR targeting guide sequence portion
aacaaaaaauccccacuaucu

SEQ ID NO: 3651 - RNA, 21 nt, Artificial Sequence
  LDLR targeting guide sequence portion
aacaaagcucuggcaggcaau

SEQ ID NO: 3652 - RNA, 21 nt, Artificial Sequence
  LDLR targeting guide sequence portion
aacaaauacagcaaccagggu

SEQ ID NO: 3653 - RNA, 21 nt, Artificial Sequence
  LDLR targeting guide sequence portion
aacaaggccggcgaggucuca

SEQ ID NO: 3654 - RNA, 21 nt, Artificial Sequence
  LDLR targeting guide sequence portion
aacacaaaugccaaauguaca

SEQ ID NO: 3655 - RNA, 21 nt, Artificial Sequence
  LDLR targeting guide sequence portion
aacacacaacagcagauggca

SEQ ID NO: 3656 - RNA, 21 nt, Artificial Sequence
  LDLR targeting guide sequence portion
aacacacacgacagaaaacag

SEQ ID NO: 3657 - RNA, 21 nt, Artificial Sequence
  LDLR targeting guide sequence portion
aacacauacccaucaacgaca

SEQ ID NO: 3658 - RNA, 21 nt, Artificial Sequence
  LDLR targeting guide sequence portion
aacacggcgauuucagaaaga

SEQ ID NO: 3659 - RNA, 21 nt, Artificial Sequence
  LDLR targeting guide sequence portion
aacacguugacuccugaguuu

SEQ ID NO: 3660 - RNA, 21 nt, Artificial Sequence
  LDLR targeting guide sequence portion
aacagaugaagacccuauuuc

SEQ ID NO: 3661 - RNA, 21 nt, Artificial Sequence
  LDLR targeting guide sequence portion
aacagcagauggcaccaacgg

SEQ ID NO: 3662 - RNA, 21 nt, Artificial Sequence
  LDLR targeting guide sequence portion
aacaggcccggggggaccagg

SEQ ID NO: 3663 - RNA, 21 nt, Artificial Sequence
  LDLR targeting guide sequence portion
aacaggcuucggacagugccc

SEQ ID NO: 3664 - RNA, 21 nt, Artificial Sequence
  LDLR targeting guide sequence portion
aacaguaacacggcgauuuca

SEQ ID NO: 3665 - RNA, 21 nt, Artificial Sequence
  LDLR targeting guide sequence portion
aacaguuucaaccaauauaca

SEQ ID NO: 3666 - RNA, 21 nt, Artificial Sequence
  LDLR targeting guide sequence portion
aacauaacaaaaaauccccac

SEQ ID NO: 3667 - RNA, 21 nt, Artificial Sequence
  LDLR targeting guide sequence portion
aacaucugccuggagucccgu

SEQ ID NO: 3668 - RNA, 21 nt, Artificial Sequence
  LDLR targeting guide sequence portion
aacaugcacggugaggccggg

SEQ ID NO: 3669 - RNA, 21 nt, Artificial Sequence
  LDLR targeting guide sequence portion
aacauggaagaugaaagggga

SEQ ID NO: 3670 - RNA, 21 nt, Artificial Sequence
  LDLR targeting guide sequence portion
aaccaaaaaguuaaaaaucag

SEQ ID NO: 3671 - RNA, 21 nt, Artificial Sequence
  LDLR targeting guide sequence portion
aaccaaaaucccaacccaagc

SEQ ID NO: 3672 - RNA, 21 nt, Artificial Sequence
  LDLR targeting guide sequence portion
aaccacuguauagaagguuuu

SEQ ID NO: 3673 - RNA, 21 nt, Artificial Sequence
  LDLR targeting guide sequence portion
aaccagaaaggcuuaucacgg

SEQ ID NO: 3674 - RNA, 21 nt, Artificial Sequence
  LDLR targeting guide sequence portion
aaccauccucccaccucagcc

SEQ ID NO: 3675 - RNA, 21 nt, Artificial Sequence
  LDLR targeting guide sequence portion
aaccaugcauggugcaucagc

SEQ ID NO: 3676 - RNA, 21 nt, Artificial Sequence
  LDLR targeting guide sequence portion
aacccaagccauugcaugggc

SEQ ID NO: 3677 - RNA, 21 nt, Artificial Sequence
  LDLR targeting guide sequence portion
aacccaccucgaaagacacug

SEQ ID NO: 3678 - RNA, 21 nt, Artificial Sequence
  LDLR targeting guide sequence portion
aacccccuacacagggccccg

SEQ ID NO: 3679 - RNA, 21 nt, Artificial Sequence
  LDLR targeting guide sequence portion
aaccccuaaacucaggaguca

SEQ ID NO: 3680 - RNA, 21 nt, Artificial Sequence
  LDLR targeting guide sequence portion
aacccugguugcuguauuugu

SEQ ID NO: 3681 - RNA, 21 nt, Artificial Sequence
  LDLR targeting guide sequence portion
aacccuuccugagaccucgcc

SEQ ID NO: 3682 - RNA, 21 nt, Artificial Sequence
  LDLR targeting guide sequence portion
aaccgggugucucaggcacuu

SEQ ID NO: 3683 - RNA, 21 nt, Artificial Sequence
  LDLR targeting guide sequence portion
aaccgugauaagccuuucugg

SEQ ID NO: 3684 - RNA, 21 nt, Artificial Sequence
  LDLR targeting guide sequence portion
aaccugaagucccgucaaacg

SEQ ID NO: 3685 - RNA, 21 nt, Artificial Sequence
  LDLR targeting guide sequence portion
aaccugccccucucugucccc

SEQ ID NO: 3686 - RNA, 21 nt, Artificial Sequence
  LDLR targeting guide sequence portion
aaccuggcugucuagcaaggc

SEQ ID NO: 3687 - RNA, 21 nt, Artificial Sequence
  LDLR targeting guide sequence portion
aacgacaagauuggggaagug

SEQ ID NO: 3688 - RNA, 21 nt, Artificial Sequence
  LDLR targeting guide sequence portion
aacgauccagacuggaggauu

SEQ ID NO: 3689 - RNA, 21 nt, Artificial Sequence
  LDLR targeting guide sequence portion
aacgcuuuuugggagaaugau

SEQ ID NO: 3690 - RNA, 21 nt, Artificial Sequence
  LDLR targeting guide sequence portion
aacgggacccccuggcccugc

SEQ ID NO: 3691 - RNA, 21 nt, Artificial Sequence
  LDLR targeting guide sequence portion
aacggggacaucauucuccca

SEQ ID NO: 3692 - RNA, 21 nt, Artificial Sequence
  LDLR targeting guide sequence portion
aacguguuuaccucuucuaug

SEQ ID NO: 3693 - RNA, 21 nt, Artificial Sequence
  LDLR targeting guide sequence portion
aacucaaaacuuccuggagag

SEQ ID NO: 3694 - RNA, 21 nt, Artificial Sequence
  LDLR targeting guide sequence portion
aacucaagugauccagcucag

SEQ ID NO: 3695 - RNA, 21 nt, Artificial Sequence
  LDLR targeting guide sequence portion
aacucaggagucaacguguuu

SEQ ID NO: 3696 - RNA, 21 nt, Artificial Sequence
  LDLR targeting guide sequence portion
aacucauucaccaaaugaugc

SEQ ID NO: 3697 - RNA, 21 nt, Artificial Sequence
  LDLR targeting guide sequence portion
aacuccugaacucaagugauc

SEQ ID NO: 3698 - RNA, 21 nt, Artificial Sequence
  LDLR targeting guide sequence portion
aacucugaacugagaaagugc

SEQ ID NO: 3699 - RNA, 21 nt, Artificial Sequence
  LDLR targeting guide sequence portion
aacugagaaagugcaaggaga

SEQ ID NO: 3700 - RNA, 21 nt, Artificial Sequence
  LDLR targeting guide sequence portion
aacugccauugucgucuuuau

SEQ ID NO: 3701 - RNA, 21 nt, Artificial Sequence
  LDLR targeting guide sequence portion
aacuggacugugugcaacgcu

SEQ ID NO: 3702 - RNA, 21 nt, Artificial Sequence
  LDLR targeting guide sequence portion
aacuuccuggagagaaaugga

SEQ ID NO: 3703 - RNA, 21 nt, Artificial Sequence
  LDLR targeting guide sequence portion
aacuuuuugguuuuuguagag

SEQ ID NO: 3704 - RNA, 21 nt, Artificial Sequence
  LDLR targeting guide sequence portion
aagaaaccaaaaucccaaccc

SEQ ID NO: 3705 - RNA, 21 nt, Artificial Sequence
  LDLR targeting guide sequence portion
aagaaccugaagucccgucaa

SEQ ID NO: 3706 - RNA, 21 nt, Artificial Sequence
  LDLR targeting guide sequence portion
aagaagaggcauuucagaggc

SEQ ID NO: 3707 - RNA, 21 nt, Artificial Sequence
  LDLR targeting guide sequence portion
aagacacugggugggucauga

SEQ ID NO: 3708 - RNA, 21 nt, Artificial Sequence
  LDLR targeting guide sequence portion
aagacagagaagaccaaagca

SEQ ID NO: 3709 - RNA, 21 nt, Artificial Sequence
  LDLR targeting guide sequence portion
aagacauucaggcuacaaaaa

SEQ ID NO: 3710 - RNA, 21 nt, Artificial Sequence
  LDLR targeting guide sequence portion
aagaccaaagcauugccugcc

SEQ ID NO: 3711 - RNA, 21 nt, Artificial Sequence
  LDLR targeting guide sequence portion
aagacgacaauggcaguucuc

SEQ ID NO: 3712 - RNA, 21 nt, Artificial Sequence
  LDLR targeting guide sequence portion
aagagaaacaggcccgggggg

SEQ ID NO: 3713 - RNA, 21 nt, Artificial Sequence
  LDLR targeting guide sequence portion
aagaggcauuucagaggcaau

SEQ ID NO: 3714 - RNA, 21 nt, Artificial Sequence
  LDLR targeting guide sequence portion
aagagguaaacacguugacuc

SEQ ID NO: 3715 - RNA, 21 nt, Artificial Sequence
  LDLR targeting guide sequence portion
aagaugaaaggggaggggaug

SEQ ID NO: 3716 - RNA, 21 nt, Artificial Sequence
  LDLR targeting guide sequence portion
aagaugucacaagggauuggc

SEQ ID NO: 3717 - RNA, 21 nt, Artificial Sequence
  LDLR targeting guide sequence portion
aagauuauuugcacgaacugg

SEQ ID NO: 3718 - RNA, 21 nt, Artificial Sequence
  LDLR targeting guide sequence portion
aagauuggggaagugaauggc

SEQ ID NO: 3719 - RNA, 21 nt, Artificial Sequence
  LDLR targeting guide sequence portion
aagcaaguggcuuucaacaca

SEQ ID NO: 3720 - RNA, 21 nt, Artificial Sequence
  LDLR targeting guide sequence portion
aagcacuaggugggcggacau

SEQ ID NO: 3721 - RNA, 21 nt, Artificial Sequence
  LDLR targeting guide sequence portion
aagcaguggcauaaucauagc

SEQ ID NO: 3722 - RNA, 21 nt, Artificial Sequence
  LDLR targeting guide sequence portion
aagcauugccugccagagcuu

SEQ ID NO: 3723 - RNA, 21 nt, Artificial Sequence
  LDLR targeting guide sequence portion
aagccaaaccccuaaacucag

SEQ ID NO: 3724 - RNA, 21 nt, Artificial Sequence
  LDLR targeting guide sequence portion
aagccacucauacauacaacg

SEQ ID NO: 3725 - RNA, 21 nt, Artificial Sequence
  LDLR targeting guide sequence portion
aagccacuugcuucucugggc

SEQ ID NO: 3726 - RNA, 21 nt, Artificial Sequence
  LDLR targeting guide sequence portion
aagccaggaaagggauucaug

SEQ ID NO: 3727 - RNA, 21 nt, Artificial Sequence
  LDLR targeting guide sequence portion
aagccauugcaugggcacugu

SEQ ID NO: 3728 - RNA, 21 nt, Artificial Sequence
  LDLR targeting guide sequence portion
aagcccgugucaaugaaugcc

SEQ ID NO: 3729 - RNA, 21 nt, Artificial Sequence
  LDLR targeting guide sequence portion
aagccgugaucgugaauaucg

SEQ ID NO: 3730 - RNA, 21 nt, Artificial Sequence
  LDLR targeting guide sequence portion
aagccuguucugccucccaga

SEQ ID NO: 3731 - RNA, 21 nt, Artificial Sequence
  LDLR targeting guide sequence portion
aagccuugcuagacagccagg

SEQ ID NO: 3732 - RNA, 21 nt, Artificial Sequence
  LDLR targeting guide sequence portion
aagccuuucugguuucggagc

SEQ ID NO: 3733 - RNA, 21 nt, Artificial Sequence
  LDLR targeting guide sequence portion
aagcgagaucccaucucuaca

SEQ ID NO: 3734 - RNA, 21 nt, Artificial Sequence
  LDLR targeting guide sequence portion
aagcguugcacacaguccagu

SEQ ID NO: 3735 - RNA, 21 nt, Artificial Sequence
  LDLR targeting guide sequence portion
aagcucuggcaggcaaugcuu

SEQ ID NO: 3736 - RNA, 21 nt, Artificial Sequence
  LDLR targeting guide sequence portion
aaggaagaaaccaaaauccca

SEQ ID NO: 3737 - RNA, 21 nt, Artificial Sequence
  LDLR targeting guide sequence portion
aaggaagguacaaacccaccu

SEQ ID NO: 3738 - RNA, 21 nt, Artificial Sequence
  LDLR targeting guide sequence portion
aaggagaccacgggaauggaa

SEQ ID NO: 3739 - RNA, 21 nt, Artificial Sequence
  LDLR targeting guide sequence portion
aaggauaagagaaacaggccc

SEQ ID NO: 3740 - RNA, 21 nt, Artificial Sequence
  LDLR targeting guide sequence portion
aaggccggcgaggucucagga

SEQ ID NO: 3741 - RNA, 21 nt, Artificial Sequence
  LDLR targeting guide sequence portion
aaggcuaaccuggcugucuag

SEQ ID NO: 3742 - RNA, 21 nt, Artificial Sequence
  LDLR targeting guide sequence portion
aaggcuuaucacgguucccug

SEQ ID NO: 3743 - RNA, 21 nt, Artificial Sequence
  LDLR targeting guide sequence portion
aaggcuugcauagaagaggua

SEQ ID NO: 3744 - RNA, 21 nt, Artificial Sequence
  LDLR targeting guide sequence portion
aagggauucauggcgucggaa

SEQ ID NO: 3745 - RNA, 21 nt, Artificial Sequence
  LDLR targeting guide sequence portion
aagggauuggcaauugucccc

SEQ ID NO: 3746 - RNA, 21 nt, Artificial Sequence
  LDLR targeting guide sequence portion
aaggggaggggaugucaggcc

SEQ ID NO: 3747 - RNA, 21 nt, Artificial Sequence
  LDLR targeting guide sequence portion
aagggugaccagugacucagg

SEQ ID NO: 3748 - RNA, 21 nt, Artificial Sequence
  LDLR targeting guide sequence portion
aaggguucugggcagggacgg

SEQ ID NO: 3749 - RNA, 21 nt, Artificial Sequence
  LDLR targeting guide sequence portion
aagguaaccgggugucucagg

SEQ ID NO: 3750 - RNA, 21 nt, Artificial Sequence
  LDLR targeting guide sequence portion
aagguacaaacccaccucgaa

SEQ ID NO: 3751 - RNA, 21 nt, Artificial Sequence
  LDLR targeting guide sequence portion
aagguuuuuguagccugaaug

SEQ ID NO: 3752 - RNA, 21 nt, Artificial Sequence
  LDLR targeting guide sequence portion
aagucccggucaaccugcccc

SEQ ID NO: 3753 - RNA, 21 nt, Artificial Sequence
  LDLR targeting guide sequence portion
aagucccgucaaacgauccag

SEQ ID NO: 3754 - RNA, 21 nt, Artificial Sequence
  LDLR targeting guide sequence portion
aagugaauggcuuggaggcau

SEQ ID NO: 3755 - RNA, 21 nt, Artificial Sequence
  LDLR targeting guide sequence portion
aagugacacccaucucccaga

SEQ ID NO: 3756 - RNA, 21 nt, Artificial Sequence
  LDLR targeting guide sequence portion
aagugauccagcucagccucc

SEQ ID NO: 3757 - RNA, 21 nt, Artificial Sequence
  LDLR targeting guide sequence portion
aagugcaaacauaacaaaaaa

SEQ ID NO: 3758 - RNA, 21 nt, Artificial Sequence
  LDLR targeting guide sequence portion
aagugcaaggagaccacggga

SEQ ID NO: 3759 - RNA, 21 nt, Artificial Sequence
  LDLR targeting guide sequence portion
aagugccugagacacccgguu

SEQ ID NO: 3760 - RNA, 21 nt, Artificial Sequence
  LDLR targeting guide sequence portion
aaguggaagcacuaggugggc

SEQ ID NO: 3761 - RNA, 21 nt, Artificial Sequence
  LDLR targeting guide sequence portion
aaguggcaucauuuggugaau

SEQ ID NO: 3762 - RNA, 21 nt, Artificial Sequence
  LDLR targeting guide sequence portion
aaguggcuuucaacacacaac

SEQ ID NO: 3763 - RNA, 21 nt, Artificial Sequence
  LDLR targeting guide sequence portion
aaguggguaggggucgggagg

SEQ ID NO: 3764 - RNA, 21 nt, Artificial Sequence
  LDLR targeting guide sequence portion
aaguuaaaaaucagcugggua

SEQ ID NO: 3765 - RNA, 21 nt, Artificial Sequence
  LDLR targeting guide sequence portion
aaguuuugaguuucucuccac

SEQ ID NO: 3766 - RNA, 21 nt, Artificial Sequence
  LDLR targeting guide sequence portion
aauaaaacaaggccggcgagg

SEQ ID NO: 3767 - RNA, 21 nt, Artificial Sequence
  LDLR targeting guide sequence portion
aauaaauaaauccuccagucu

SEQ ID NO: 3768 - RNA, 21 nt, Artificial Sequence
  LDLR targeting guide sequence portion
aauaaauauuaagggugacca

SEQ ID NO: 3769 - RNA, 21 nt, Artificial Sequence
  LDLR targeting guide sequence portion
aauaaauccuccagucuggau

SEQ ID NO: 3770 - RNA, 21 nt, Artificial Sequence
  LDLR targeting guide sequence portion
aauaacacaaaugccaaaugu

SEQ ID NO: 3771 - RNA, 21 nt, Artificial Sequence
  LDLR targeting guide sequence portion
aauaacccccuacacagggcc

SEQ ID NO: 3772 - RNA, 21 nt, Artificial Sequence
  LDLR targeting guide sequence portion
aauacagcaaccaggguuugc

SEQ ID NO: 3773 - RNA, 21 nt, Artificial Sequence
  LDLR targeting guide sequence portion
aauagucacugaacaaauaca

SEQ ID NO: 3774 - RNA, 21 nt, Artificial Sequence
  LDLR targeting guide sequence portion
aauauauaaaacaaagcucug

SEQ ID NO: 3775 - RNA, 21 nt, Artificial Sequence
  LDLR targeting guide sequence portion
aauaucgagaacugccauugu

SEQ ID NO: 3776 - RNA, 21 nt, Artificial Sequence
  LDLR targeting guide sequence portion
aauauuaagggugaccaguga

SEQ ID NO: 3777 - RNA, 21 nt, Artificial Sequence
  LDLR targeting guide sequence portion
aauauuuauuaagugccugag

SEQ ID NO: 3778 - RNA, 21 nt, Artificial Sequence
  LDLR targeting guide sequence portion
aaucagcuggguacgguggca

SEQ ID NO: 3779 - RNA, 21 nt, Artificial Sequence
  LDLR targeting guide sequence portion
aaucauagcucacgacagccu

SEQ ID NO: 3780 - RNA, 21 nt, Artificial Sequence
  LDLR targeting guide sequence portion
aaucaugacccacccaguguc

SEQ ID NO: 3781 - RNA, 21 nt, Artificial Sequence
  LDLR targeting guide sequence portion
aaucccaacccaagccauugc

SEQ ID NO: 3782 - RNA, 21 nt, Artificial Sequence
  LDLR targeting guide sequence portion
aauccccacuaucuguacagg

SEQ ID NO: 3783 - RNA, 21 nt, Artificial Sequence
  LDLR targeting guide sequence portion
aaucccuugugacaucuucac

SEQ ID NO: 3784 - RNA, 21 nt, Artificial Sequence
  LDLR targeting guide sequence portion
aaucccuuuccuggcuuaagg

SEQ ID NO: 3785 - RNA, 21 nt, Artificial Sequence
  LDLR targeting guide sequence portion
aauccgugguggcaccgagac

SEQ ID NO: 3786 - RNA, 21 nt, Artificial Sequence
  LDLR targeting guide sequence portion
aauccucaaacauggaagaug

SEQ ID NO: 3787 - RNA, 21 nt, Artificial Sequence
  LDLR targeting guide sequence portion
aauccuccagucuggaucguu

SEQ ID NO: 3788 - RNA, 21 nt, Artificial Sequence
  LDLR targeting guide sequence portion
aaucgccguguuacuguugca

SEQ ID NO: 3789 - RNA, 21 nt, Artificial Sequence
  LDLR targeting guide sequence portion
aaucucuaagccaaaccccua

SEQ ID NO: 3790 - RNA, 21 nt, Artificial Sequence
  LDLR targeting guide sequence portion
aaucuugucguugauggguau

SEQ ID NO: 3791 - RNA, 21 nt, Artificial Sequence
  LDLR targeting guide sequence portion
aaugaaugccggggacagaga

SEQ ID NO: 3792 - RNA, 21 nt, Artificial Sequence
  LDLR targeting guide sequence portion
aaugaauuuggccagacacag

SEQ ID NO: 3793 - RNA, 21 nt, Artificial Sequence
  LDLR targeting guide sequence portion
aaugaguuuggucucggugcc

SEQ ID NO: 3794 - RNA, 21 nt, Artificial Sequence
  LDLR targeting guide sequence portion
aaugaucuggcugaauccgug

SEQ ID NO: 3795 - RNA, 21 nt, Artificial Sequence
  LDLR targeting guide sequence portion
aaugaugccacuucccagagg

SEQ ID NO: 3796 - RNA, 21 nt, Artificial Sequence
  LDLR targeting guide sequence portion
aaugauguccccguuguaugu

SEQ ID NO: 3797 - RNA, 21 nt, Artificial Sequence
  LDLR targeting guide sequence portion
aaugccaaauguacacagugu

SEQ ID NO: 3798 - RNA, 21 nt, Artificial Sequence
  LDLR targeting guide sequence portion
aaugccggggacagagagggg

SEQ ID NO: 3799 - RNA, 21 nt, Artificial Sequence
  LDLR targeting guide sequence portion
aaugccuccaagccauucacu

SEQ ID NO: 3800 - RNA, 21 nt, Artificial Sequence
  LDLR targeting guide sequence portion
aaugccugagcucaaaccauc

SEQ ID NO: 3801 - RNA, 21 nt, Artificial Sequence
  LDLR targeting guide sequence portion
aaugcgucccuguacagauag

SEQ ID NO: 3802 - RNA, 21 nt, Artificial Sequence
  LDLR targeting guide sequence portion
aaugcuuuggucuucucuguc

SEQ ID NO: 3803 - RNA, 21 nt, Artificial Sequence
  LDLR targeting guide sequence portion
aauggaaguggguaggggucg

SEQ ID NO: 3804 - RNA, 21 nt, Artificial Sequence
  LDLR targeting guide sequence portion
aauggaggugucauccugguc

SEQ ID NO: 3805 - RNA, 21 nt, Artificial Sequence
  LDLR targeting guide sequence portion
aauggcaguucucgauauuca

SEQ ID NO: 3806 - RNA, 21 nt, Artificial Sequence
  LDLR targeting guide sequence portion
aauggcuuggaggcauuugca

SEQ ID NO: 3807 - RNA, 21 nt, Artificial Sequence
  LDLR targeting guide sequence portion
aauggcuuggguugggauuuu

SEQ ID NO: 3808 - RNA, 21 nt, Artificial Sequence
  LDLR targeting guide sequence portion
aauguacacaguguacaacuc

SEQ ID NO: 3809 - RNA, 21 nt, Artificial Sequence
  LDLR targeting guide sequence portion
aauugaucacaguaagacauu

SEQ ID NO: 3810 - RNA, 21 nt, Artificial Sequence
  LDLR targeting guide sequence portion
aauugccaaucccuugugaca

SEQ ID NO: 3811 - RNA, 21 nt, Artificial Sequence
  LDLR targeting guide sequence portion
aauuguccccagggacaaaac

SEQ ID NO: 3812 - RNA, 21 nt, Artificial Sequence
  LDLR targeting guide sequence portion
aauuuggccagacacaggugc

SEQ ID NO: 3813 - RNA, 21 nt, Artificial Sequence
  LDLR targeting guide sequence portion
acaaaaaauccccacuaucug

SEQ ID NO: 3814 - RNA, 21 nt, Artificial Sequence
  LDLR targeting guide sequence portion
acaaacccaccucgaaagaca

SEQ ID NO: 3815 - RNA, 21 nt, Artificial Sequence
  LDLR targeting guide sequence portion
acaaagauuauuugcacgaac

SEQ ID NO: 3816 - RNA, 21 nt, Artificial Sequence
  LDLR targeting guide sequence portion
acaaagcucuggcaggcaaug

SEQ ID NO: 3817 - RNA, 21 nt, Artificial Sequence
  LDLR targeting guide sequence portion
acaaauacagcaaccaggguu

SEQ ID NO: 3818 - RNA, 21 nt, Artificial Sequence
  LDLR targeting guide sequence portion
acaaaugccaaauguacacag

SEQ ID NO: 3819 - RNA, 21 nt, Artificial Sequence
  LDLR targeting guide sequence portion
acaacagcagauggcaccaac

SEQ ID NO: 3820 - RNA, 21 nt, Artificial Sequence
  LDLR targeting guide sequence portion
acaacggggacaucauucucc

SEQ ID NO: 3821 - RNA, 21 nt, Artificial Sequence
  LDLR targeting guide sequence portion
acaacucugaacugagaaagu

SEQ ID NO: 3822 - RNA, 21 nt, Artificial Sequence
  LDLR targeting guide sequence portion
acaagauuggggaagugaaug

SEQ ID NO: 3823 - RNA, 21 nt, Artificial Sequence
  LDLR targeting guide sequence portion
acaaggccggcgaggucucag

SEQ ID NO: 3824 - RNA, 21 nt, Artificial Sequence
  LDLR targeting guide sequence portion
acaagggauuggcaauugucc

SEQ ID NO: 3825 - RNA, 21 nt, Artificial Sequence
  LDLR targeting guide sequence portion
acaauccucaaacauggaaga

SEQ ID NO: 3826 - RNA, 21 nt, Artificial Sequence
  LDLR targeting guide sequence portion
acaauggcaguucucgauauu

SEQ ID NO: 3827 - RNA, 21 nt, Artificial Sequence
  LDLR targeting guide sequence portion
acaauugccaaucccuuguga

SEQ ID NO: 3828 - RNA, 21 nt, Artificial Sequence
  LDLR targeting guide sequence portion
acacaaaugccaaauguacac

SEQ ID NO: 3829 - RNA, 21 nt, Artificial Sequence
  LDLR targeting guide sequence portion
acacaacagcagauggcacca

SEQ ID NO: 3830 - RNA, 21 nt, Artificial Sequence
  LDLR targeting guide sequence portion
acacaauccucaaacauggaa

SEQ ID NO: 3831 - RNA, 21 nt, Artificial Sequence
  LDLR targeting guide sequence portion
acacacaacagcagauggcac

SEQ ID NO: 3832 - RNA, 21 nt, Artificial Sequence
  LDLR targeting guide sequence portion
acacacacgacagaaaacagu

SEQ ID NO: 3833 - RNA, 21 nt, Artificial Sequence
  LDLR targeting guide sequence portion
acacacgacagaaaacagugc

SEQ ID NO: 3834 - RNA, 21 nt, Artificial Sequence
  LDLR targeting guide sequence portion
acacagggccccgagaauagu

SEQ ID NO: 3835 - RNA, 21 nt, Artificial Sequence
  LDLR targeting guide sequence portion
acacaggugccucacgccugu

SEQ ID NO: 3836 - RNA, 21 nt, Artificial Sequence
  LDLR targeting guide sequence portion
acacaguccaguucgugcaaa

SEQ ID NO: 3837 - RNA, 21 nt, Artificial Sequence
  LDLR targeting guide sequence portion
acacaguguacaacucugaac

SEQ ID NO: 3838 - RNA, 21 nt, Artificial Sequence
  LDLR targeting guide sequence portion
acacaguguuuugucccuggg

SEQ ID NO: 3839 - RNA, 21 nt, Artificial Sequence
  LDLR targeting guide sequence portion
acacauacccaucaacgacaa

SEQ ID NO: 3840 - RNA, 21 nt, Artificial Sequence
  LDLR targeting guide sequence portion
acaccagccuggugcccaucc

SEQ ID NO: 3841 - RNA, 21 nt, Artificial Sequence
  LDLR targeting guide sequence portion
acacccaucucccagaagcca

SEQ ID NO: 3842 - RNA, 21 nt, Artificial Sequence
  LDLR targeting guide sequence portion
acacccgguuaccuuggccgu

SEQ ID NO: 3843 - RNA, 21 nt, Artificial Sequence
  LDLR targeting guide sequence portion
acaccuccauuucucuccagg

SEQ ID NO: 3844 - RNA, 21 nt, Artificial Sequence
  LDLR targeting guide sequence portion
acaccugggugcaggccacgu

SEQ ID NO: 3845 - RNA, 21 nt, Artificial Sequence
  LDLR targeting guide sequence portion
acacgacagaaaacagugcaa

SEQ ID NO: 3846 - RNA, 21 nt, Artificial Sequence
  LDLR targeting guide sequence portion
acacggcgauuucagaaagaa

SEQ ID NO: 3847 - RNA, 21 nt, Artificial Sequence
  LDLR targeting guide sequence portion
acacgggcuuucccuggccug

SEQ ID NO: 3848 - RNA, 21 nt, Artificial Sequence
  LDLR targeting guide sequence portion
acacguggccugcacccaggu

SEQ ID NO: 3849 - RNA, 21 nt, Artificial Sequence
  LDLR targeting guide sequence portion
acacguugacuccugaguuua

SEQ ID NO: 3850 - RNA, 21 nt, Artificial Sequence
  LDLR targeting guide sequence portion
acacugggugggucaugauuc

SEQ ID NO: 3851 - RNA, 21 nt, Artificial Sequence
  LDLR targeting guide sequence portion
acacuguguacauuuggcauu

SEQ ID NO: 3852 - RNA, 21 nt, Artificial Sequence
  LDLR targeting guide sequence portion
acagagaagaccaaagcauug

SEQ ID NO: 3853 - RNA, 21 nt, Artificial Sequence
  LDLR targeting guide sequence portion
acagagaggggcagguugacc

SEQ ID NO: 3854 - RNA, 21 nt, Artificial Sequence
  LDLR targeting guide sequence portion
acagauaguggggauuuuuug

SEQ ID NO: 3855 - RNA, 21 nt, Artificial Sequence
  LDLR targeting guide sequence portion
acagaugaagacccuauuuca

SEQ ID NO: 3856 - RNA, 21 nt, Artificial Sequence
  LDLR targeting guide sequence portion
acagauggucagucuggagga

SEQ ID NO: 3857 - RNA, 21 nt, Artificial Sequence
  LDLR targeting guide sequence portion
acagcaaccaggguuugcaaa

SEQ ID NO: 3858 - RNA, 21 nt, Artificial Sequence
  LDLR targeting guide sequence portion
acagcagauggcaccaacggg

SEQ ID NO: 3859 - RNA, 21 nt, Artificial Sequence
  LDLR targeting guide sequence portion
acagccacaccugggugcagg

SEQ ID NO: 3860 - RNA, 21 nt, Artificial Sequence
  LDLR targeting guide sequence portion
acagccagguuagccuuugcc

SEQ ID NO: 3861 - RNA, 21 nt, Artificial Sequence
  LDLR targeting guide sequence portion
acagccucaaaugccugagcu

SEQ ID NO: 3862 - RNA, 21 nt, Artificial Sequence
  LDLR targeting guide sequence portion
acagccuccgucagacucccg

SEQ ID NO: 3863 - RNA, 21 nt, Artificial Sequence
  LDLR targeting guide sequence portion
acaggcacgugccaccguacc

SEQ ID NO: 3864 - RNA, 21 nt, Artificial Sequence
  LDLR targeting guide sequence portion
acaggcccggggggaccagga

SEQ ID NO: 3865 - RNA, 21 nt, Artificial Sequence
  LDLR targeting guide sequence portion
acaggcgugaggcaccugugu

SEQ ID NO: 3866 - RNA, 21 nt, Artificial Sequence
  LDLR targeting guide sequence portion
acaggcuucggacagugccca

SEQ ID NO: 3867 - RNA, 21 nt, Artificial Sequence
  LDLR targeting guide sequence portion
acagggacgcauuuacgugcu

SEQ ID NO: 3868 - RNA, 21 nt, Artificial Sequence
  LDLR targeting guide sequence portion
acagggcaaaggcuaaccugg

SEQ ID NO: 3869 - RNA, 21 nt, Artificial Sequence
  LDLR targeting guide sequence portion
acagggccccgagaauaguca

SEQ ID NO: 3870 - RNA, 21 nt, Artificial Sequence
  LDLR targeting guide sequence portion
acaggugccucacgccuguaa

SEQ ID NO: 3871 - RNA, 21 nt, Artificial Sequence
  LDLR targeting guide sequence portion
acaguaacacggcgauuucag

SEQ ID NO: 3872 - RNA, 21 nt, Artificial Sequence
  LDLR targeting guide sequence portion
acaguaagacauucaggcuac

SEQ ID NO: 3873 - RNA, 21 nt, Artificial Sequence
  LDLR targeting guide sequence portion
acaguccaguucgugcaaaua

SEQ ID NO: 3874 - RNA, 21 nt, Artificial Sequence
  LDLR targeting guide sequence portion
acagugacagccuccgucaga

SEQ ID NO: 3875 - RNA, 21 nt, Artificial Sequence
  LDLR targeting guide sequence portion
acagugcaaaauaauaacaca

SEQ ID NO: 3876 - RNA, 21 nt, Artificial Sequence
  LDLR targeting guide sequence portion
acagugcccaugcaauggcuu

SEQ ID NO: 3877 - RNA, 21 nt, Artificial Sequence
  LDLR targeting guide sequence portion
acagugguuuaaaaagugaca

SEQ ID NO: 3878 - RNA, 21 nt, Artificial Sequence
  LDLR targeting guide sequence portion
acaguguacaacucugaacug

SEQ ID NO: 3879 - RNA, 21 nt, Artificial Sequence
  LDLR targeting guide sequence portion
acaguguuuugucccugggga

SEQ ID NO: 3880 - RNA, 21 nt, Artificial Sequence
  LDLR targeting guide sequence portion
acaguuucaaccaauauacaa

SEQ ID NO: 3881 - RNA, 21 nt, Artificial Sequence
  LDLR targeting guide sequence portion
acauaaagaagaggcauuuca

SEQ ID NO: 3882 - RNA, 21 nt, Artificial Sequence
  LDLR targeting guide sequence portion
acauaaagacgacaauggcag

SEQ ID NO: 3883 - RNA, 21 nt, Artificial Sequence
  LDLR targeting guide sequence portion
acauaacaaaaaauccccacu

SEQ ID NO: 3884 - RNA, 21 nt, Artificial Sequence
  LDLR targeting guide sequence portion
acauacaacggggacaucauu

SEQ ID NO: 3885 - RNA, 21 nt, Artificial Sequence
  LDLR targeting guide sequence portion
acaucagugcaacaguaacac

SEQ ID NO: 3886 - RNA, 21 nt, Artificial Sequence
  LDLR targeting guide sequence portion
acaucauucucccaaaaagcg

SEQ ID NO: 3887 - RNA, 21 nt, Artificial Sequence
  LDLR targeting guide sequence portion
acauccccuccccuuucaucu

SEQ ID NO: 3888 - RNA, 21 nt, Artificial Sequence
  LDLR targeting guide sequence portion
acaucugccuggagucccguc

SEQ ID NO: 3889 - RNA, 21 nt, Artificial Sequence
  LDLR targeting guide sequence portion
acaucuucacgcgggagucug

SEQ ID NO: 3890 - RNA, 21 nt, Artificial Sequence
  LDLR targeting guide sequence portion
acaugcacggugaggccgggc

SEQ ID NO: 3891 - RNA, 21 nt, Artificial Sequence
  LDLR targeting guide sequence portion
acauggaagaugaaaggggag

SEQ ID NO: 3892 - RNA, 21 nt, Artificial Sequence
  LDLR targeting guide sequence portion
acauucaggcuacaaaaaccu

SEQ ID NO: 3893 - RNA, 21 nt, Artificial Sequence
  LDLR targeting guide sequence portion
accaaaaaguuaaaaaucagc

SEQ ID NO: 3894 - RNA, 21 nt, Artificial Sequence
  LDLR targeting guide sequence portion
accaaaaucccaacccaagcc

SEQ ID NO: 3895 - RNA, 21 nt, Artificial Sequence
  LDLR targeting guide sequence portion
accaaacucauucaccaaaug

SEQ ID NO: 3896 - RNA, 21 nt, Artificial Sequence
  LDLR targeting guide sequence portion
accaaagcauugccugccaga

SEQ ID NO: 3897 - RNA, 21 nt, Artificial Sequence
  LDLR targeting guide sequence portion
accaaaugaugccacuuccca

SEQ ID NO: 3898 - RNA, 21 nt, Artificial Sequence
  LDLR targeting guide sequence portion
accaacgggacccccuggccc

SEQ ID NO: 3899 - RNA, 21 nt, Artificial Sequence
  LDLR targeting guide sequence portion
accaaucucuaagccaaaccc

SEQ ID NO: 3900 - RNA, 21 nt, Artificial Sequence
  LDLR targeting guide sequence portion
accacggauucagccagauca

SEQ ID NO: 3901 - RNA, 21 nt, Artificial Sequence
  LDLR targeting guide sequence portion
accacgggaauggaagugggu

SEQ ID NO: 3902 - RNA, 21 nt, Artificial Sequence
  LDLR targeting guide sequence portion
accacuguauagaagguuuuu

SEQ ID NO: 3903 - RNA, 21 nt, Artificial Sequence
  LDLR targeting guide sequence portion
accagaaaggcuuaucacggu

SEQ ID NO: 3904 - RNA, 21 nt, Artificial Sequence
  LDLR targeting guide sequence portion
accagccuggugcccauccuc

SEQ ID NO: 3905 - RNA, 21 nt, Artificial Sequence
  LDLR targeting guide sequence portion
accaggaugacaccuccauuu

SEQ ID NO: 3906 - RNA, 21 nt, Artificial Sequence
  LDLR targeting guide sequence portion
accaggccugagcaacaaagc

SEQ ID NO: 3907 - RNA, 21 nt, Artificial Sequence
  LDLR targeting guide sequence portion
accaggcugguguccugacag

SEQ ID NO: 3908 - RNA, 21 nt, Artificial Sequence
  LDLR targeting guide sequence portion
accagugacucaggcucugcc

SEQ ID NO: 3909 - RNA, 21 nt, Artificial Sequence
  LDLR targeting guide sequence portion
accauccucccaccucagccu

SEQ ID NO: 3910 - RNA, 21 nt, Artificial Sequence
  LDLR targeting guide sequence portion
accaugcauggugcaucagca

SEQ ID NO: 3911 - RNA, 21 nt, Artificial Sequence
  LDLR targeting guide sequence portion
acccaagccauugcaugggca

SEQ ID NO: 3912 - RNA, 21 nt, Artificial Sequence
  LDLR targeting guide sequence portion
acccacccagugucuuucgag

SEQ ID NO: 3913 - RNA, 21 nt, Artificial Sequence
  LDLR targeting guide sequence portion
acccaccucgaaagacacugg

SEQ ID NO: 3914 - RNA, 21 nt, Artificial Sequence
  LDLR targeting guide sequence portion
acccacuuccauucccguggu

SEQ ID NO: 3915 - RNA, 21 nt, Artificial Sequence
  LDLR targeting guide sequence portion
acccagcugauuuuuaacuuu

SEQ ID NO: 3916 - RNA, 21 nt, Artificial Sequence
  LDLR targeting guide sequence portion
acccagguguggcugucagga

SEQ ID NO: 3917 - RNA, 21 nt, Artificial Sequence
  LDLR targeting guide sequence portion
acccagugucuuucgaggugg

SEQ ID NO: 3918 - RNA, 21 nt, Artificial Sequence
  LDLR targeting guide sequence portion
acccaucaacgacaagauugg

SEQ ID NO: 3919 - RNA, 21 nt, Artificial Sequence
  LDLR targeting guide sequence portion
acccaucucccagaagccacu

SEQ ID NO: 3920 - RNA, 21 nt, Artificial Sequence
  LDLR targeting guide sequence portion
accccaucucuuaaaaaauga

SEQ ID NO: 3921 - RNA, 21 nt, Artificial Sequence
  LDLR targeting guide sequence portion
acccccgaaucaugacccacc

SEQ ID NO: 3922 - RNA, 21 nt, Artificial Sequence
  LDLR targeting guide sequence portion
acccccuacacagggccccga

SEQ ID NO: 3923 - RNA, 21 nt, Artificial Sequence
  LDLR targeting guide sequence portion
acccccuggcccugccucauc

SEQ ID NO: 3924 - RNA, 21 nt, Artificial Sequence
  LDLR targeting guide sequence portion
accccuaaacucaggagucaa

SEQ ID NO: 3925 - RNA, 21 nt, Artificial Sequence
  LDLR targeting guide sequence portion
accccuacccacuuccauucc

SEQ ID NO: 3926 - RNA, 21 nt, Artificial Sequence
  LDLR targeting guide sequence portion
acccgguuaccuuggccguga

SEQ ID NO: 3927 - RNA, 21 nt, Artificial Sequence
  LDLR targeting guide sequence portion
acccugguugcuguauuuguu

SEQ ID NO: 3928 - RNA, 21 nt, Artificial Sequence
  LDLR targeting guide sequence portion
acccuuaauauuuauuaagug

SEQ ID NO: 3929 - RNA, 21 nt, Artificial Sequence
  LDLR targeting guide sequence portion
acccuuccugagaccucgccg

SEQ ID NO: 3930 - RNA, 21 nt, Artificial Sequence
  LDLR targeting guide sequence portion
accgagaccaaacucauucac

SEQ ID NO: 3931 - RNA, 21 nt, Artificial Sequence
  LDLR targeting guide sequence portion
accgggacuucaaagccguga

SEQ ID NO: 3932 - RNA, 21 nt, Artificial Sequence
  LDLR targeting guide sequence portion
accgggugucucaggcacuua

SEQ ID NO: 3933 - RNA, 21 nt, Artificial Sequence
  LDLR targeting guide sequence portion
accguacccagcugauuuuua

SEQ ID NO: 3934 - RNA, 21 nt, Artificial Sequence
  LDLR targeting guide sequence portion
accgugacacaauccucaaac

SEQ ID NO: 3935 - RNA, 21 nt, Artificial Sequence
  LDLR targeting guide sequence portion
accgugauaagccuuucuggu

SEQ ID NO: 3936 - RNA, 21 nt, Artificial Sequence
  LDLR targeting guide sequence portion
accgugcauguuuuaaacaca

SEQ ID NO: 3937 - RNA, 21 nt, Artificial Sequence
  LDLR targeting guide sequence portion
accuagugcuuccacuucuau

SEQ ID NO: 3938 - RNA, 21 nt, Artificial Sequence
  LDLR targeting guide sequence portion
accucagccucgccaugccug

SEQ ID NO: 3939 - RNA, 21 nt, Artificial Sequence
  LDLR targeting guide sequence portion
accuccauuucucuccaggaa

SEQ ID NO: 3940 - RNA, 21 nt, Artificial Sequence
  LDLR targeting guide sequence portion
accucgaaagacacugggugg

SEQ ID NO: 3941 - RNA, 21 nt, Artificial Sequence
  LDLR targeting guide sequence portion
accucgccggccuuguuuuau

SEQ ID NO: 3942 - RNA, 21 nt, Artificial Sequence
  LDLR targeting guide sequence portion
accucuucuaugcaagccuug

SEQ ID NO: 3943 - RNA, 21 nt, Artificial Sequence
  LDLR targeting guide sequence portion
accugaagucccgucaaacga

SEQ ID NO: 3944 - RNA, 21 nt, Artificial Sequence
  LDLR targeting guide sequence portion
accugccccucucuguccccg

SEQ ID NO: 3945 - RNA, 21 nt, Artificial Sequence
  LDLR targeting guide sequence portion
accuggcugucuagcaaggcu

SEQ ID NO: 3946 - RNA, 21 nt, Artificial Sequence
  LDLR targeting guide sequence portion
accugggugcaggccacgugu

SEQ ID NO: 3947 - RNA, 21 nt, Artificial Sequence
  LDLR targeting guide sequence portion
accugugucuggccaaauuca

SEQ ID NO: 3948 - RNA, 21 nt, Artificial Sequence
  LDLR targeting guide sequence portion
accuuccuuaagccaggaaag

SEQ ID NO: 3949 - RNA, 21 nt, Artificial Sequence
  LDLR targeting guide sequence portion
accuucuauacagugguuuaa

SEQ ID NO: 3950 - RNA, 21 nt, Artificial Sequence
  LDLR targeting guide sequence portion
accuuggccgugaggacacgu

SEQ ID NO: 3951 - RNA, 21 nt, Artificial Sequence
  LDLR targeting guide sequence portion
acgaacuggacugugugcaac

SEQ ID NO: 3952 - RNA, 21 nt, Artificial Sequence
  LDLR targeting guide sequence portion
acgacaagauuggggaaguga

SEQ ID NO: 3953 - RNA, 21 nt, Artificial Sequence
  LDLR targeting guide sequence portion
acgacaauggcaguucucgau

SEQ ID NO: 3954 - RNA, 21 nt, Artificial Sequence
  LDLR targeting guide sequence portion
acgacagccucaaaugccuga

SEQ ID NO: 3955 - RNA, 21 nt, Artificial Sequence
  LDLR targeting guide sequence portion
acgaggaaaggaagaaaccaa

SEQ ID NO: 3956 - RNA, 21 nt, Artificial Sequence
  LDLR targeting guide sequence portion
acgaucacggcuuugaagucc

SEQ ID NO: 3957 - RNA, 21 nt, Artificial Sequence
  LDLR targeting guide sequence portion
acgauccagacuggaggauuu

SEQ ID NO: 3958 - RNA, 21 nt, Artificial Sequence
  LDLR targeting guide sequence portion
acgcauuuacgugcuccgaaa

SEQ ID NO: 3959 - RNA, 21 nt, Artificial Sequence
  LDLR targeting guide sequence portion
acgccacgucauccuccagac

SEQ ID NO: 3960 - RNA, 21 nt, Artificial Sequence
  LDLR targeting guide sequence portion
acgccaugaaucccuuuccug

SEQ ID NO: 3961 - RNA, 21 nt, Artificial Sequence
  LDLR targeting guide sequence portion
acgcgggagucugacggaggc

SEQ ID NO: 3962 - RNA, 21 nt, Artificial Sequence
  LDLR targeting guide sequence portion
acgcuuuuugggagaaugaug

SEQ ID NO: 3963 - RNA, 21 nt, Artificial Sequence
  LDLR targeting guide sequence portion
acggaggcugucacugucucu

SEQ ID NO: 3964 - RNA, 21 nt, Artificial Sequence
  LDLR targeting guide sequence portion
acggauucagccagaucauuu

SEQ ID NO: 3965 - RNA, 21 nt, Artificial Sequence
  LDLR targeting guide sequence portion
acggccaagguaaccgggugu

SEQ ID NO: 3966 - RNA, 21 nt, Artificial Sequence
  LDLR targeting guide sequence portion
acggcgauuucagaaagaacc

SEQ ID NO: 3967 - RNA, 21 nt, Artificial Sequence
  LDLR targeting guide sequence portion
acggcuuugaagucccgguca

SEQ ID NO: 3968 - RNA, 21 nt, Artificial Sequence
  LDLR targeting guide sequence portion
acgggaauggaaguggguagg

SEQ ID NO: 3969 - RNA, 21 nt, Artificial Sequence
  LDLR targeting guide sequence portion
acgggacccccuggcccugcc

SEQ ID NO: 3970 - RNA, 21 nt, Artificial Sequence
  LDLR targeting guide sequence portion
acgggacuccaggcagauguu

SEQ ID NO: 3971 - RNA, 21 nt, Artificial Sequence
  LDLR targeting guide sequence portion
acgggacuucagguucuuucu

SEQ ID NO: 3972 - RNA, 21 nt, Artificial Sequence
  LDLR targeting guide sequence portion
acgggcuuucccuggccuggg

SEQ ID NO: 3973 - RNA, 21 nt, Artificial Sequence
  LDLR targeting guide sequence portion
acggggacaucauucucccaa

SEQ ID NO: 3974 - RNA, 21 nt, Artificial Sequence
  LDLR targeting guide sequence portion
acggugaggccgggcgcagug

SEQ ID NO: 3975 - RNA, 21 nt, Artificial Sequence
  LDLR targeting guide sequence portion
acgguggagagaaacucaaaa

SEQ ID NO: 3976 - RNA, 21 nt, Artificial Sequence
  LDLR targeting guide sequence portion
acguaaaugcgucccuguaca

SEQ ID NO: 3977 - RNA, 21 nt, Artificial Sequence
  LDLR targeting guide sequence portion
acgucauccuccagacugacc

SEQ ID NO: 3978 - RNA, 21 nt, Artificial Sequence
  LDLR targeting guide sequence portion
acgugccaccguacccagcug

SEQ ID NO: 3979 - RNA, 21 nt, Artificial Sequence
  LDLR targeting guide sequence portion
acgugcuccgaaaccagaaag

SEQ ID NO: 3980 - RNA, 21 nt, Artificial Sequence
  LDLR targeting guide sequence portion
acguggccugcacccaggugu

SEQ ID NO: 3981 - RNA, 21 nt, Artificial Sequence
  LDLR targeting guide sequence portion
acguggcgugaacaucugccu

SEQ ID NO: 3982 - RNA, 21 nt, Artificial Sequence
  LDLR targeting guide sequence portion
acguguccucacggccaaggu

SEQ ID NO: 3983 - RNA, 21 nt, Artificial Sequence
  LDLR targeting guide sequence portion
acguguuuaccucuucuaugc

SEQ ID NO: 3984 - RNA, 21 nt, Artificial Sequence
  LDLR targeting guide sequence portion
acguugacuccugaguuuagg

SEQ ID NO: 3985 - RNA, 21 nt, Artificial Sequence
  LDLR targeting guide sequence portion
acuaggugggcggacauaaag

SEQ ID NO: 3986 - RNA, 21 nt, Artificial Sequence
  LDLR targeting guide sequence portion
acuaucuguacagggacgcau

SEQ ID NO: 3987 - RNA, 21 nt, Artificial Sequence
  LDLR targeting guide sequence portion
acuauguugcccaggcuggaa

SEQ ID NO: 3988 - RNA, 21 nt, Artificial Sequence
  LDLR targeting guide sequence portion
acuauucucggggcccugugu

SEQ ID NO: 3989 - RNA, 21 nt, Artificial Sequence
  LDLR targeting guide sequence portion
acucaaaacuuccuggagaga

SEQ ID NO: 3990 - RNA, 21 nt, Artificial Sequence
  LDLR targeting guide sequence portion
acucaagugauccagcucagc

SEQ ID NO: 3991 - RNA, 21 nt, Artificial Sequence
  LDLR targeting guide sequence portion
acucaggagucaacguguuua

SEQ ID NO: 3992 - RNA, 21 nt, Artificial Sequence
  LDLR targeting guide sequence portion
acucaggcucugccucuggga

SEQ ID NO: 3993 - RNA, 21 nt, Artificial Sequence
  LDLR targeting guide sequence portion
acucauacauacaacggggac

SEQ ID NO: 3994 - RNA, 21 nt, Artificial Sequence
  LDLR targeting guide sequence portion
acucauucaccaaaugaugcc

SEQ ID NO: 3995 - RNA, 21 nt, Artificial Sequence
  LDLR targeting guide sequence portion
acuccaggcagauguucacgc

SEQ ID NO: 3996 - RNA, 21 nt, Artificial Sequence
  LDLR targeting guide sequence portion
acucccgcgugaagaugucac

SEQ ID NO: 3997 - RNA, 21 nt, Artificial Sequence
  LDLR targeting guide sequence portion
acuccugaacucaagugaucc

SEQ ID NO: 3998 - RNA, 21 nt, Artificial Sequence
  LDLR targeting guide sequence portion
acuccugaguuuagggguuug

SEQ ID NO: 3999 - RNA, 21 nt, Artificial Sequence
  LDLR targeting guide sequence portion
acucugaacugagaaagugca

SEQ ID NO: 4000 - RNA, 21 nt, Artificial Sequence
  LDLR targeting guide sequence portion
acugaacaaauacagcaacca

SEQ ID NO: 4001 - RNA, 21 nt, Artificial Sequence
  LDLR targeting guide sequence portion
acugagaaagugcaaggagac

SEQ ID NO: 4002 - RNA, 21 nt, Artificial Sequence
  LDLR targeting guide sequence portion
acugauguccggagagacagu

SEQ ID NO: 4003 - RNA, 21 nt, Artificial Sequence
  LDLR targeting guide sequence portion
acugccauugucgucuuuaug

SEQ ID NO: 4004 - RNA, 21 nt, Artificial Sequence
  LDLR targeting guide sequence portion
acugcgcccggccucaccgug

SEQ ID NO: 4005 - RNA, 21 nt, Artificial Sequence
  LDLR targeting guide sequence portion
acugcuuuccagccugggcaa

SEQ ID NO: 4006 - RNA, 21 nt, Artificial Sequence
  LDLR targeting guide sequence portion
acuggacugugugcaacgcuu

SEQ ID NO: 4007 - RNA, 21 nt, Artificial Sequence
  LDLR targeting guide sequence portion
acugggugggucaugauucgg

SEQ ID NO: 4008 - RNA, 21 nt, Artificial Sequence
  LDLR targeting guide sequence portion
acuguauagaagguuuuugua

SEQ ID NO: 4009 - RNA, 21 nt, Artificial Sequence
  LDLR targeting guide sequence portion
acuguccgaagccuguucugc

SEQ ID NO: 4010 - RNA, 21 nt, Artificial Sequence
  LDLR targeting guide sequence portion
acugucucuccggacaucagu

SEQ ID NO: 4011 - RNA, 21 nt, Artificial Sequence
  LDLR targeting guide sequence portion
acuguguacauuuggcauuug

SEQ ID NO: 4012 - RNA, 21 nt, Artificial Sequence
  LDLR targeting guide sequence portion
acugugugcaacgcuuuuugg

SEQ ID NO: 4013 - RNA, 21 nt, Artificial Sequence
  LDLR targeting guide sequence portion
acuguugcacugauguccgga

SEQ ID NO: 4014 - RNA, 21 nt, Artificial Sequence
  LDLR targeting guide sequence portion
acuguuuucugucgugugugu

SEQ ID NO: 4015 - RNA, 21 nt, Artificial Sequence
  LDLR targeting guide sequence portion
acuucaaagccgugaucguga

SEQ ID NO: 4016 - RNA, 21 nt, Artificial Sequence
  LDLR targeting guide sequence portion
acuucagguucuuucugaaau

SEQ ID NO: 4017 - RNA, 21 nt, Artificial Sequence
  LDLR targeting guide sequence portion
acuuccauucccguggucucc

SEQ ID NO: 4018 - RNA, 21 nt, Artificial Sequence
  LDLR targeting guide sequence portion
acuucccagaggcagagccug

SEQ ID NO: 4019 - RNA, 21 nt, Artificial Sequence
  LDLR targeting guide sequence portion
acuuccccaaucuugucguug

SEQ ID NO: 4020 - RNA, 21 nt, Artificial Sequence
  LDLR targeting guide sequence portion
acuuccuggagagaaauggag

SEQ ID NO: 4021 - RNA, 21 nt, Artificial Sequence
  LDLR targeting guide sequence portion
acuucuaugcaaaugccucca

SEQ ID NO: 4022 - RNA, 21 nt, Artificial Sequence
  LDLR targeting guide sequence portion
acuugcuucucugggccugac

SEQ ID NO: 4023 - RNA, 21 nt, Artificial Sequence
  LDLR targeting guide sequence portion
acuuucucaguucagaguugu

SEQ ID NO: 4024 - RNA, 21 nt, Artificial Sequence
  LDLR targeting guide sequence portion
acuuugggaggcugagcugga

SEQ ID NO: 4025 - RNA, 21 nt, Artificial Sequence
  LDLR targeting guide sequence portion
acuuuuugguuuuuguagaga

SEQ ID NO: 4026 - RNA, 21 nt, Artificial Sequence
  LDLR targeting guide sequence portion
agaaacaggcccggggggacc

SEQ ID NO: 4027 - RNA, 21 nt, Artificial Sequence
  LDLR targeting guide sequence portion
agaaaccaaaaucccaaccca

SEQ ID NO: 4028 - RNA, 21 nt, Artificial Sequence
  LDLR targeting guide sequence portion
agaaacucaaaacuuccugga

SEQ ID NO: 4029 - RNA, 21 nt, Artificial Sequence
  LDLR targeting guide sequence portion
agaaagaaccugaagucccgu

SEQ ID NO: 4030 - RNA, 21 nt, Artificial Sequence
  LDLR targeting guide sequence portion
agaaaggcuuaucacgguucc

SEQ ID NO: 4031 - RNA, 21 nt, Artificial Sequence
  LDLR targeting guide sequence portion
agaaagugcaaggagaccacg

SEQ ID NO: 4032 - RNA, 21 nt, Artificial Sequence
  LDLR targeting guide sequence portion
agaaauggaggugucauccug

SEQ ID NO: 4033 - RNA, 21 nt, Artificial Sequence
  LDLR targeting guide sequence portion
agaacaggcuucggacagugc

SEQ ID NO: 4034 - RNA, 21 nt, Artificial Sequence
  LDLR targeting guide sequence portion
agaacccuuccugagaccucg

SEQ ID NO: 4035 - RNA, 21 nt, Artificial Sequence
  LDLR targeting guide sequence portion
agaaccugaagucccgucaaa

SEQ ID NO: 4036 - RNA, 21 nt, Artificial Sequence
  LDLR targeting guide sequence portion
agaacugccauugucgucuuu

SEQ ID NO: 4037 - RNA, 21 nt, Artificial Sequence
  LDLR targeting guide sequence portion
agaagaccaaagcauugccug

SEQ ID NO: 4038 - RNA, 21 nt, Artificial Sequence
  LDLR targeting guide sequence portion
agaagaggcauuucagaggca

SEQ ID NO: 4039 - RNA, 21 nt, Artificial Sequence
  LDLR targeting guide sequence portion
agaagagguaaacacguugac

SEQ ID NO: 4040 - RNA, 21 nt, Artificial Sequence
  LDLR targeting guide sequence portion
agaagcaaguggcuuucaaca

SEQ ID NO: 4041 - RNA, 21 nt, Artificial Sequence
  LDLR targeting guide sequence portion
agaagccacucauacauacaa

SEQ ID NO: 4042 - RNA, 21 nt, Artificial Sequence
  LDLR targeting guide sequence portion
agaagguuuuuguagccugaa

SEQ ID NO: 4043 - RNA, 21 nt, Artificial Sequence
  LDLR targeting guide sequence portion
agaaguggaagcacuaggugg

SEQ ID NO: 4044 - RNA, 21 nt, Artificial Sequence
  LDLR targeting guide sequence portion
agaauagucacugaacaaaua

SEQ ID NO: 4045 - RNA, 21 nt, Artificial Sequence
  LDLR targeting guide sequence portion
agaaugauguccccguuguau

SEQ ID NO: 4046 - RNA, 21 nt, Artificial Sequence
  LDLR targeting guide sequence portion
agacacaggugccucacgccu

SEQ ID NO: 4047 - RNA, 21 nt, Artificial Sequence
  LDLR targeting guide sequence portion
agacacccgguuaccuuggcc

SEQ ID NO: 4048 - RNA, 21 nt, Artificial Sequence
  LDLR targeting guide sequence portion
agacacugggugggucaugau

SEQ ID NO: 4049 - RNA, 21 nt, Artificial Sequence
  LDLR targeting guide sequence portion
agacagagaagaccaaagcau

SEQ ID NO: 4050 - RNA, 21 nt, Artificial Sequence
  LDLR targeting guide sequence portion
agacagauggucagucuggag

SEQ ID NO: 4051 - RNA, 21 nt, Artificial Sequence
  LDLR targeting guide sequence portion
agacagccagguuagccuuug

SEQ ID NO: 4052 - RNA, 21 nt, Artificial Sequence
  LDLR targeting guide sequence portion
agacagugacagccuccguca

SEQ ID NO: 4053 - RNA, 21 nt, Artificial Sequence
  LDLR targeting guide sequence portion
agacauucaggcuacaaaaac

SEQ ID NO: 4054 - RNA, 21 nt, Artificial Sequence
  LDLR targeting guide sequence portion
agaccaaacucauucaccaaa

SEQ ID NO: 4055 - RNA, 21 nt, Artificial Sequence
  LDLR targeting guide sequence portion
agaccaaagcauugccugcca

SEQ ID NO: 4056 - RNA, 21 nt, Artificial Sequence
  LDLR targeting guide sequence portion
agaccacgggaauggaagugg

SEQ ID NO: 4057 - RNA, 21 nt, Artificial Sequence
  LDLR targeting guide sequence portion
agaccaggccugagcaacaaa

SEQ ID NO: 4058 - RNA, 21 nt, Artificial Sequence
  LDLR targeting guide sequence portion
agaccucgccggccuuguuuu

SEQ ID NO: 4059 - RNA, 21 nt, Artificial Sequence
  LDLR targeting guide sequence portion
agacgacaauggcaguucucg

SEQ ID NO: 4060 - RNA, 21 nt, Artificial Sequence
  LDLR targeting guide sequence portion
agacucccgcgugaagauguc

SEQ ID NO: 4061 - RNA, 21 nt, Artificial Sequence
  LDLR targeting guide sequence portion
agagaaacaggcccgggggga

SEQ ID NO: 4062 - RNA, 21 nt, Artificial Sequence
  LDLR targeting guide sequence portion
agagaaacucaaaacuuccug

SEQ ID NO: 4063 - RNA, 21 nt, Artificial Sequence
  LDLR targeting guide sequence portion
agagaaauggaggugucaucc

SEQ ID NO: 4064 - RNA, 21 nt, Artificial Sequence
  LDLR targeting guide sequence portion
agagaagaccaaagcauugcc

SEQ ID NO: 4065 - RNA, 21 nt, Artificial Sequence
  LDLR targeting guide sequence portion
agagaagcaaguggcuuucaa

SEQ ID NO: 4066 - RNA, 21 nt, Artificial Sequence
  LDLR targeting guide sequence portion
agagacagugacagccuccgu

SEQ ID NO: 4067 - RNA, 21 nt, Artificial Sequence
  LDLR targeting guide sequence portion
agagaggggcagguugaccgg

SEQ ID NO: 4068 - RNA, 21 nt, Artificial Sequence
  LDLR targeting guide sequence portion
agagaugggaucucgcuuugu

SEQ ID NO: 4069 - RNA, 21 nt, Artificial Sequence
  LDLR targeting guide sequence portion
agagauugguggaugaggcag

SEQ ID NO: 4070 - RNA, 21 nt, Artificial Sequence
  LDLR targeting guide sequence portion
agagccugagucacuggucac

SEQ ID NO: 4071 - RNA, 21 nt, Artificial Sequence
  LDLR targeting guide sequence portion
agaggcaauaacccccuacac

SEQ ID NO: 4072 - RNA, 21 nt, Artificial Sequence
  LDLR targeting guide sequence portion
agaggcagagccugagucacu

SEQ ID NO: 4073 - RNA, 21 nt, Artificial Sequence
  LDLR targeting guide sequence portion
agaggcauuucagaggcaaua

SEQ ID NO: 4074 - RNA, 21 nt, Artificial Sequence
  LDLR targeting guide sequence portion
agaggccaugggcugcugaug

SEQ ID NO: 4075 - RNA, 21 nt, Artificial Sequence
  LDLR targeting guide sequence portion
agaggggcagguugaccggga

SEQ ID NO: 4076 - RNA, 21 nt, Artificial Sequence
  LDLR targeting guide sequence portion
agagguaaacacguugacucc

SEQ ID NO: 4077 - RNA, 21 nt, Artificial Sequence
  LDLR targeting guide sequence portion
agaguuguacacuguguacau

SEQ ID NO: 4078 - RNA, 21 nt, Artificial Sequence
  LDLR targeting guide sequence portion
agaucauuuccgacgccauga

SEQ ID NO: 4079 - RNA, 21 nt, Artificial Sequence
  LDLR targeting guide sequence portion
agaucccaucucuacaaaaac

SEQ ID NO: 4080 - RNA, 21 nt, Artificial Sequence
  LDLR targeting guide sequence portion
agaugaaaggggaggggaugu

SEQ ID NO: 4081 - RNA, 21 nt, Artificial Sequence
  LDLR targeting guide sequence portion
agaugaagacccuauuucaga

SEQ ID NO: 4082 - RNA, 21 nt, Artificial Sequence
  LDLR targeting guide sequence portion
agauggcaccaacgggacccc

SEQ ID NO: 4083 - RNA, 21 nt, Artificial Sequence
  LDLR targeting guide sequence portion
agaugggaucucgcuuuguug

SEQ ID NO: 4084 - RNA, 21 nt, Artificial Sequence
  LDLR targeting guide sequence portion
agaugggugucacuuuuuaaa

SEQ ID NO: 4085 - RNA, 21 nt, Artificial Sequence
  LDLR targeting guide sequence portion
agauggucagucuggaggaug

SEQ ID NO: 4086 - RNA, 21 nt, Artificial Sequence
  LDLR targeting guide sequence portion
agaugucacaagggauuggca

SEQ ID NO: 4087 - RNA, 21 nt, Artificial Sequence
  LDLR targeting guide sequence portion
agauguucacgccacgucauc

SEQ ID NO: 4088 - RNA, 21 nt, Artificial Sequence
  LDLR targeting guide sequence portion
agauuauuugcacgaacugga

SEQ ID NO: 4089 - RNA, 21 nt, Artificial Sequence
  LDLR targeting guide sequence portion
agauuggggaagugaauggcu

SEQ ID NO: 4090 - RNA, 21 nt, Artificial Sequence
  LDLR targeting guide sequence portion
agauugguggaugaggcaggg

SEQ ID NO: 4091 - RNA, 21 nt, Artificial Sequence
  LDLR targeting guide sequence portion
agcaaccaggguuugcaaaaa

SEQ ID NO: 4092 - RNA, 21 nt, Artificial Sequence
  LDLR targeting guide sequence portion
agcaaggcuugcauagaagag

SEQ ID NO: 4093 - RNA, 21 nt, Artificial Sequence
  LDLR targeting guide sequence portion
agcaaguggcuuucaacacac

SEQ ID NO: 4094 - RNA, 21 nt, Artificial Sequence
  LDLR targeting guide sequence portion
agcacguaaaugcgucccugu

SEQ ID NO: 4095 - RNA, 21 nt, Artificial Sequence
  LDLR targeting guide sequence portion
agcacuaggugggcggacaua

SEQ ID NO: 4096 - RNA, 21 nt, Artificial Sequence
  LDLR targeting guide sequence portion
agcacuuugggaggcugagcu

SEQ ID NO: 4097 - RNA, 21 nt, Artificial Sequence
  LDLR targeting guide sequence portion
agcagauggcaccaacgggac

SEQ ID NO: 4098 - RNA, 21 nt, Artificial Sequence
  LDLR targeting guide sequence portion
agcagcccauggccucuggcc

SEQ ID NO: 4099 - RNA, 21 nt, Artificial Sequence
  LDLR targeting guide sequence portion
agcaguggcauaaucauagcu

SEQ ID NO: 4100 - RNA, 21 nt, Artificial Sequence
  LDLR targeting guide sequence portion
agcauugccugccagagcuuu

SEQ ID NO: 4101 - RNA, 21 nt, Artificial Sequence
  LDLR targeting guide sequence portion
agccaaaccccuaaacucagg

SEQ ID NO: 4102 - RNA, 21 nt, Artificial Sequence
  LDLR targeting guide sequence portion
agccacaccugggugcaggcc

SEQ ID NO: 4103 - RNA, 21 nt, Artificial Sequence
  LDLR targeting guide sequence portion
agccacucauacauacaacgg

SEQ ID NO: 4104 - RNA, 21 nt, Artificial Sequence
  LDLR targeting guide sequence portion
agccacugcgcccggccucac

SEQ ID NO: 4105 - RNA, 21 nt, Artificial Sequence
  LDLR targeting guide sequence portion
agccacuugcuucucugggcc

SEQ ID NO: 4106 - RNA, 21 nt, Artificial Sequence
  LDLR targeting guide sequence portion
agccagaucauuuccgacgcc

SEQ ID NO: 4107 - RNA, 21 nt, Artificial Sequence
  LDLR targeting guide sequence portion
agccaggaaagggauucaugg

SEQ ID NO: 4108 - RNA, 21 nt, Artificial Sequence
  LDLR targeting guide sequence portion
agccagguuagccuuugcccu

SEQ ID NO: 4109 - RNA, 21 nt, Artificial Sequence
  LDLR targeting guide sequence portion
agccauucacuuccccaaucu

SEQ ID NO: 4110 - RNA, 21 nt, Artificial Sequence
  LDLR targeting guide sequence portion
agccauugcaugggcacuguc

SEQ ID NO: 4111 - RNA, 21 nt, Artificial Sequence
  LDLR targeting guide sequence portion
agcccauggccucuggccagg

SEQ ID NO: 4112 - RNA, 21 nt, Artificial Sequence
  LDLR targeting guide sequence portion
agcccgugucaaugaaugccg

SEQ ID NO: 4113 - RNA, 21 nt, Artificial Sequence
  LDLR targeting guide sequence portion
agccgugaucgugaauaucga

SEQ ID NO: 4114 - RNA, 21 nt, Artificial Sequence
  LDLR targeting guide sequence portion
agccucaaaugccugagcuca

SEQ ID NO: 4115 - RNA, 21 nt, Artificial Sequence
  LDLR targeting guide sequence portion
agccuccgucagacucccgcg

SEQ ID NO: 4116 - RNA, 21 nt, Artificial Sequence
  LDLR targeting guide sequence portion
agccucgccaugccuggccag

SEQ ID NO: 4117 - RNA, 21 nt, Artificial Sequence
  LDLR targeting guide sequence portion
agccugaaugucuuacuguga

SEQ ID NO: 4118 - RNA, 21 nt, Artificial Sequence
  LDLR targeting guide sequence portion
agccugagucacuggucaccc

SEQ ID NO: 4119 - RNA, 21 nt, Artificial Sequence
  LDLR targeting guide sequence portion
agccuggugcccauccucccg

SEQ ID NO: 4120 - RNA, 21 nt, Artificial Sequence
  LDLR targeting guide sequence portion
agccuguucugccucccagau

SEQ ID NO: 4121 - RNA, 21 nt, Artificial Sequence
  LDLR targeting guide sequence portion
agccuugcuagacagccaggu

SEQ ID NO: 4122 - RNA, 21 nt, Artificial Sequence
  LDLR targeting guide sequence portion
agccuuucugguuucggagca

SEQ ID NO: 4123 - RNA, 21 nt, Artificial Sequence
  LDLR targeting guide sequence portion
agccuuugcccugucaccccc

SEQ ID NO: 4124 - RNA, 21 nt, Artificial Sequence
  LDLR targeting guide sequence portion
agcgagaucccaucucuacaa

SEQ ID NO: 4125 - RNA, 21 nt, Artificial Sequence
  LDLR targeting guide sequence portion
agcguugcacacaguccaguu

SEQ ID NO: 4126 - RNA, 21 nt, Artificial Sequence
  LDLR targeting guide sequence portion
agcuaugauuaugccacugcu

SEQ ID NO: 4127 - RNA, 21 nt, Artificial Sequence
  LDLR targeting guide sequence portion
agcucacgacagccucaaaug

SEQ ID NO: 4128 - RNA, 21 nt, Artificial Sequence
  LDLR targeting guide sequence portion
agcucaggcauuugaggcugu

SEQ ID NO: 4129 - RNA, 21 nt, Artificial Sequence
  LDLR targeting guide sequence portion
agcucuggcaggcaaugcuuu

SEQ ID NO: 4130 - RNA, 21 nt, Artificial Sequence
  LDLR targeting guide sequence portion
agcuggaucacuugaguucag

SEQ ID NO: 4131 - RNA, 21 nt, Artificial Sequence
  LDLR targeting guide sequence portion
agcuggguacgguggcacgug

SEQ ID NO: 4132 - RNA, 21 nt, Artificial Sequence
  LDLR targeting guide sequence portion
aggaaaggaagaaaccaaaau

SEQ ID NO: 4133 - RNA, 21 nt, Artificial Sequence
  LDLR targeting guide sequence portion
aggaaagggauucauggcguc

SEQ ID NO: 4134 - RNA, 21 nt, Artificial Sequence
  LDLR targeting guide sequence portion
aggaagaaaccaaaaucccaa

SEQ ID NO: 4135 - RNA, 21 nt, Artificial Sequence
  LDLR targeting guide sequence portion
aggaaggguucugggcaggga

SEQ ID NO: 4136 - RNA, 21 nt, Artificial Sequence
  LDLR targeting guide sequence portion
aggaagguacaaacccaccuc

SEQ ID NO: 4137 - RNA, 21 nt, Artificial Sequence
  LDLR targeting guide sequence portion
aggaaguuuugaguuucucuc

SEQ ID NO: 4138 - RNA, 21 nt, Artificial Sequence
  LDLR targeting guide sequence portion
aggacaccagccuggugccca

SEQ ID NO: 4139 - RNA, 21 nt, Artificial Sequence
  LDLR targeting guide sequence portion
aggacacguggccugcaccca

SEQ ID NO: 4140 - RNA, 21 nt, Artificial Sequence
  LDLR targeting guide sequence portion
aggagaccacgggaauggaag

SEQ ID NO: 4141 - RNA, 21 nt, Artificial Sequence
  LDLR targeting guide sequence portion
aggagucaacguguuuaccuc

SEQ ID NO: 4142 - RNA, 21 nt, Artificial Sequence
  LDLR targeting guide sequence portion
aggaguuggagaccaggccug

SEQ ID NO: 4143 - RNA, 21 nt, Artificial Sequence
  LDLR targeting guide sequence portion
aggauaagagaaacaggcccg

SEQ ID NO: 4144 - RNA, 21 nt, Artificial Sequence
  LDLR targeting guide sequence portion
aggaugacaccuccauuucuc

SEQ ID NO: 4145 - RNA, 21 nt, Artificial Sequence
  LDLR targeting guide sequence portion
aggaugacguggcgugaacau

SEQ ID NO: 4146 - RNA, 21 nt, Artificial Sequence
  LDLR targeting guide sequence portion
aggaugggcaccaggcuggug

SEQ ID NO: 4147 - RNA, 21 nt, Artificial Sequence
  LDLR targeting guide sequence portion
aggaugguuugagcucaggca

SEQ ID NO: 4148 - RNA, 21 nt, Artificial Sequence
  LDLR targeting guide sequence portion
aggauugugucacgguggaga

SEQ ID NO: 4149 - RNA, 21 nt, Artificial Sequence
  LDLR targeting guide sequence portion
aggcaauaacccccuacacag

SEQ ID NO: 4150 - RNA, 21 nt, Artificial Sequence
  LDLR targeting guide sequence portion
aggcaaugcuuuggucuucuc

SEQ ID NO: 4151 - RNA, 21 nt, Artificial Sequence
  LDLR targeting guide sequence portion
aggcaccugugucuggccaaa

SEQ ID NO: 4152 - RNA, 21 nt, Artificial Sequence
  LDLR targeting guide sequence portion
aggcacgugccaccguaccca

SEQ ID NO: 4153 - RNA, 21 nt, Artificial Sequence
  LDLR targeting guide sequence portion
aggcacuuaauaaauauuaag

SEQ ID NO: 4154 - RNA, 21 nt, Artificial Sequence
  LDLR targeting guide sequence portion
aggcagaacaggcuucggaca

SEQ ID NO: 4155 - RNA, 21 nt, Artificial Sequence
  LDLR targeting guide sequence portion
aggcagagccugagucacugg

SEQ ID NO: 4156 - RNA, 21 nt, Artificial Sequence
  LDLR targeting guide sequence portion
aggcagauguucacgccacgu

SEQ ID NO: 4157 - RNA, 21 nt, Artificial Sequence
  LDLR targeting guide sequence portion
aggcagggccagggggucccg

SEQ ID NO: 4158 - RNA, 21 nt, Artificial Sequence
  LDLR targeting guide sequence portion
aggcauggcgaggcugaggug

SEQ ID NO: 4159 - RNA, 21 nt, Artificial Sequence
  LDLR targeting guide sequence portion
aggcauuucagaggcaauaac

SEQ ID NO: 4160 - RNA, 21 nt, Artificial Sequence
  LDLR targeting guide sequence portion
aggcauuugaggcugucguga

SEQ ID NO: 4161 - RNA, 21 nt, Artificial Sequence
  LDLR targeting guide sequence portion
aggcauuugcauagaagugga

SEQ ID NO: 4162 - RNA, 21 nt, Artificial Sequence
  LDLR targeting guide sequence portion
aggccacguguccucacggcc

SEQ ID NO: 4163 - RNA, 21 nt, Artificial Sequence
  LDLR targeting guide sequence portion
aggccagggaaagcccguguc

SEQ ID NO: 4164 - RNA, 21 nt, Artificial Sequence
  LDLR targeting guide sequence portion
aggccaugggcugcugaugca

SEQ ID NO: 4165 - RNA, 21 nt, Artificial Sequence
  LDLR targeting guide sequence portion
aggcccagagaagcaaguggc

SEQ ID NO: 4166 - RNA, 21 nt, Artificial Sequence
  LDLR targeting guide sequence portion
aggcccggggggaccaggaug

SEQ ID NO: 4167 - RNA, 21 nt, Artificial Sequence
  LDLR targeting guide sequence portion
aggccggcgaggucucaggaa

SEQ ID NO: 4168 - RNA, 21 nt, Artificial Sequence
  LDLR targeting guide sequence portion
aggccugagcaacaaagcgag

SEQ ID NO: 4169 - RNA, 21 nt, Artificial Sequence
  LDLR targeting guide sequence portion
aggccuggucuccaacuccug

SEQ ID NO: 4170 - RNA, 21 nt, Artificial Sequence
  LDLR targeting guide sequence portion
aggcgugaggcaccugugucu

SEQ ID NO: 4171 - RNA, 21 nt, Artificial Sequence
  LDLR targeting guide sequence portion
aggcuaaccuggcugucuagc

SEQ ID NO: 4172 - RNA, 21 nt, Artificial Sequence
  LDLR targeting guide sequence portion
aggcuacaaaaaccuucuaua

SEQ ID NO: 4173 - RNA, 21 nt, Artificial Sequence
  LDLR targeting guide sequence portion
aggcucugccucugggaagug

SEQ ID NO: 4174 - RNA, 21 nt, Artificial Sequence
  LDLR targeting guide sequence portion
aggcugagcuggaucacuuga

SEQ ID NO: 4175 - RNA, 21 nt, Artificial Sequence
  LDLR targeting guide sequence portion
aggcuggaaagcaguggcaua

SEQ ID NO: 4176 - RNA, 21 nt, Artificial Sequence
  LDLR targeting guide sequence portion
aggcugguguccugacagcca

SEQ ID NO: 4177 - RNA, 21 nt, Artificial Sequence
  LDLR targeting guide sequence portion
aggcugucacugucucuccgg

SEQ ID NO: 4178 - RNA, 21 nt, Artificial Sequence
  LDLR targeting guide sequence portion
aggcuuaucacgguucccugc

SEQ ID NO: 4179 - RNA, 21 nt, Artificial Sequence
  LDLR targeting guide sequence portion
aggcuucggacagugcccaug

SEQ ID NO: 4180 - RNA, 21 nt, Artificial Sequence
  LDLR targeting guide sequence portion
aggcuugcauagaagagguaa

SEQ ID NO: 4181 - RNA, 21 nt, Artificial Sequence
  LDLR targeting guide sequence portion
agggaaagcccgugucaauga

SEQ ID NO: 4182 - RNA, 21 nt, Artificial Sequence
  LDLR targeting guide sequence portion
agggaaccgugauaagccuuu

SEQ ID NO: 4183 - RNA, 21 nt, Artificial Sequence
  LDLR targeting guide sequence portion
agggacgcauuuacgugcucc

SEQ ID NO: 4184 - RNA, 21 nt, Artificial Sequence
  LDLR targeting guide sequence portion
agggacgggacuccaggcaga

SEQ ID NO: 4185 - RNA, 21 nt, Artificial Sequence
  LDLR targeting guide sequence portion
agggauucauggcgucggaaa

SEQ ID NO: 4186 - RNA, 21 nt, Artificial Sequence
  LDLR targeting guide sequence portion
agggauuggcaauugucccca

SEQ ID NO: 4187 - RNA, 21 nt, Artificial Sequence
  LDLR targeting guide sequence portion
agggcaaaggcuaaccuggcu

SEQ ID NO: 4188 - RNA, 21 nt, Artificial Sequence
  LDLR targeting guide sequence portion
agggccagggggucccguugg

SEQ ID NO: 4189 - RNA, 21 nt, Artificial Sequence
  LDLR targeting guide sequence portion
agggccccgagaauagucacu

SEQ ID NO: 4190 - RNA, 21 nt, Artificial Sequence
  LDLR targeting guide sequence portion
aggggaggggaugucaggccc

SEQ ID NO: 4191 - RNA, 21 nt, Artificial Sequence
  LDLR targeting guide sequence portion
aggggaugucaggcccagaga

SEQ ID NO: 4192 - RNA, 21 nt, Artificial Sequence
  LDLR targeting guide sequence portion
aggggcagguugaccgggacu

SEQ ID NO: 4193 - RNA, 21 nt, Artificial Sequence
  LDLR targeting guide sequence portion
agggggucccguuggugccau

SEQ ID NO: 4194 - RNA, 21 nt, Artificial Sequence
  LDLR targeting guide sequence portion
aggggguuauugccucugaaa

SEQ ID NO: 4195 - RNA, 21 nt, Artificial Sequence
  LDLR targeting guide sequence portion
aggggucgggaggaugggcac

SEQ ID NO: 4196 - RNA, 21 nt, Artificial Sequence
  LDLR targeting guide sequence portion
agggguuuggcuuagagauug

SEQ ID NO: 4197 - RNA, 21 nt, Artificial Sequence
  LDLR targeting guide sequence portion
agggugaccagugacucaggc

SEQ ID NO: 4198 - RNA, 21 nt, Artificial Sequence
  LDLR targeting guide sequence portion
aggguucugggcagggacggg

SEQ ID NO: 4199 - RNA, 21 nt, Artificial Sequence
  LDLR targeting guide sequence portion
agguaaacacguugacuccug

SEQ ID NO: 4200 - RNA, 21 nt, Artificial Sequence
  LDLR targeting guide sequence portion
agguaaccgggugucucaggc

SEQ ID NO: 4201 - RNA, 21 nt, Artificial Sequence
  LDLR targeting guide sequence portion
agguacaaacccaccucgaaa

SEQ ID NO: 4202 - RNA, 21 nt, Artificial Sequence
  LDLR targeting guide sequence portion
aggucucaggaaggguucugg

SEQ ID NO: 4203 - RNA, 21 nt, Artificial Sequence
  LDLR targeting guide sequence portion
aggugggaggaugguuugagc

SEQ ID NO: 4204 - RNA, 21 nt, Artificial Sequence
  LDLR targeting guide sequence portion
aggugggcggacauaaagacg

SEQ ID NO: 4205 - RNA, 21 nt, Artificial Sequence
  LDLR targeting guide sequence portion
agguggguuuguaccuuccuu

SEQ ID NO: 4206 - RNA, 21 nt, Artificial Sequence
  LDLR targeting guide sequence portion
aggugucauccuggucccccc

SEQ ID NO: 4207 - RNA, 21 nt, Artificial Sequence
  LDLR targeting guide sequence portion
agguguggcugucaggacacc

SEQ ID NO: 4208 - RNA, 21 nt, Artificial Sequence
  LDLR targeting guide sequence portion
agguuagccuuugcccuguca

SEQ ID NO: 4209 - RNA, 21 nt, Artificial Sequence
  LDLR targeting guide sequence portion
agguucuuucugaaaucgccg

SEQ ID NO: 4210 - RNA, 21 nt, Artificial Sequence
  LDLR targeting guide sequence portion
agguugaccgggacuucaaag

SEQ ID NO: 4211 - RNA, 21 nt, Artificial Sequence
  LDLR targeting guide sequence portion
agguuuuuguagccugaaugu

SEQ ID NO: 4212 - RNA, 21 nt, Artificial Sequence
  LDLR targeting guide sequence portion
aguaacacggcgauuucagaa

SEQ ID NO: 4213 - RNA, 21 nt, Artificial Sequence
  LDLR targeting guide sequence portion
aguaagacauucaggcuacaa

SEQ ID NO: 4214 - RNA, 21 nt, Artificial Sequence
  LDLR targeting guide sequence portion
aguaagaccccaucucuuaaa

SEQ ID NO: 4215 - RNA, 21 nt, Artificial Sequence
  LDLR targeting guide sequence portion
agucaacguguuuaccucuuc

SEQ ID NO: 4216 - RNA, 21 nt, Artificial Sequence
  LDLR targeting guide sequence portion
agucacugaacaaauacagca

SEQ ID NO: 4217 - RNA, 21 nt, Artificial Sequence
  LDLR targeting guide sequence portion
agucacuggucacccuuaaua

SEQ ID NO: 4218 - RNA, 21 nt, Artificial Sequence
  LDLR targeting guide sequence portion
aguccaguucgugcaaauaau

SEQ ID NO: 4219 - RNA, 21 nt, Artificial Sequence
  LDLR targeting guide sequence portion
agucccggucaaccugccccu

SEQ ID NO: 4220 - RNA, 21 nt, Artificial Sequence
  LDLR targeting guide sequence portion
agucccgucaaacgauccaga

SEQ ID NO: 4221 - RNA, 21 nt, Artificial Sequence
  LDLR targeting guide sequence portion
agucccgucccugcccagaac

SEQ ID NO: 4222 - RNA, 21 nt, Artificial Sequence
  LDLR targeting guide sequence portion
agucugacggaggcugucacu

SEQ ID NO: 4223 - RNA, 21 nt, Artificial Sequence
  LDLR targeting guide sequence portion
agucuggaggaugacguggcg

SEQ ID NO: 4224 - RNA, 21 nt, Artificial Sequence
  LDLR targeting guide sequence portion
agucuggaucguuugacggga

SEQ ID NO: 4225 - RNA, 21 nt, Artificial Sequence
  LDLR targeting guide sequence portion
agugaauggcuuggaggcauu

SEQ ID NO: 4226 - RNA, 21 nt, Artificial Sequence
  LDLR targeting guide sequence portion
agugacacccaucucccagaa

SEQ ID NO: 4227 - RNA, 21 nt, Artificial Sequence
  LDLR targeting guide sequence portion
agugacagccuccgucagacu

SEQ ID NO: 4228 - RNA, 21 nt, Artificial Sequence
  LDLR targeting guide sequence portion
agugacuauucucggggcccu

SEQ ID NO: 4229 - RNA, 21 nt, Artificial Sequence
  LDLR targeting guide sequence portion
agugacucaggcucugccucu

SEQ ID NO: 4230 - RNA, 21 nt, Artificial Sequence
  LDLR targeting guide sequence portion
agugauccagcucagccuccc

SEQ ID NO: 4231 - RNA, 21 nt, Artificial Sequence
  LDLR targeting guide sequence portion
agugcaaacauaacaaaaaau

SEQ ID NO: 4232 - RNA, 21 nt, Artificial Sequence
  LDLR targeting guide sequence portion
agugcaacaguaacacggcga

SEQ ID NO: 4233 - RNA, 21 nt, Artificial Sequence
  LDLR targeting guide sequence portion
agugcaaggagaccacgggaa

SEQ ID NO: 4234 - RNA, 21 nt, Artificial Sequence
  LDLR targeting guide sequence portion
agugcagggaaccgugauaag

SEQ ID NO: 4235 - RNA, 21 nt, Artificial Sequence
  LDLR targeting guide sequence portion
agugcccaugcaauggcuugg

SEQ ID NO: 4236 - RNA, 21 nt, Artificial Sequence
  LDLR targeting guide sequence portion
agugccugagacacccgguua

SEQ ID NO: 4237 - RNA, 21 nt, Artificial Sequence
  LDLR targeting guide sequence portion
agugcuuccacuucuaugcaa

SEQ ID NO: 4238 - RNA, 21 nt, Artificial Sequence
  LDLR targeting guide sequence portion
aguggaagcacuaggugggcg

SEQ ID NO: 4239 - RNA, 21 nt, Artificial Sequence
  LDLR targeting guide sequence portion
aguggcaucauuuggugaaug

SEQ ID NO: 4240 - RNA, 21 nt, Artificial Sequence
  LDLR targeting guide sequence portion
aguggcuucugggagaugggu

SEQ ID NO: 4241 - RNA, 21 nt, Artificial Sequence
  LDLR targeting guide sequence portion
aguggcuuucaacacacaaca

SEQ ID NO: 4242 - RNA, 21 nt, Artificial Sequence
  LDLR targeting guide sequence portion
aguggggauuuuuuguuaugu

SEQ ID NO: 4243 - RNA, 21 nt, Artificial Sequence
  LDLR targeting guide sequence portion
aguggguaggggucgggagga

SEQ ID NO: 4244 - RNA, 21 nt, Artificial Sequence
  LDLR targeting guide sequence portion
agugguuuaaaaagugacacc

SEQ ID NO: 4245 - RNA, 21 nt, Artificial Sequence
  LDLR targeting guide sequence portion
aguguacaacucugaacugag

SEQ ID NO: 4246 - RNA, 21 nt, Artificial Sequence
  LDLR targeting guide sequence portion
agugucuuucgagguggguuu

SEQ ID NO: 4247 - RNA, 21 nt, Artificial Sequence
  LDLR targeting guide sequence portion
aguguuuugucccuggggaca

SEQ ID NO: 4248 - RNA, 21 nt, Artificial Sequence
  LDLR targeting guide sequence portion
aguuaaaaaucagcuggguac

SEQ ID NO: 4249 - RNA, 21 nt, Artificial Sequence
  LDLR targeting guide sequence portion
aguucagaguuguacacugug

SEQ ID NO: 4250 - RNA, 21 nt, Artificial Sequence
  LDLR targeting guide sequence portion
aguucaggaguuggagaccag

SEQ ID NO: 4251 - RNA, 21 nt, Artificial Sequence
  LDLR targeting guide sequence portion
aguucucgauauucacgauca

SEQ ID NO: 4252 - RNA, 21 nt, Artificial Sequence
  LDLR targeting guide sequence portion
aguuggagaccaggccugagc

SEQ ID NO: 4253 - RNA, 21 nt, Artificial Sequence
  LDLR targeting guide sequence portion
aguuguacacuguguacauuu

SEQ ID NO: 4254 - RNA, 21 nt, Artificial Sequence
  LDLR targeting guide sequence portion
aguuguauuucugaaauaggg

SEQ ID NO: 4255 - RNA, 21 nt, Artificial Sequence
  LDLR targeting guide sequence portion
aguuuagggguuuggcuuaga

SEQ ID NO: 4256 - RNA, 21 nt, Artificial Sequence
  LDLR targeting guide sequence portion
aguuucucuccaccgugacac

SEQ ID NO: 4257 - RNA, 21 nt, Artificial Sequence
  LDLR targeting guide sequence portion
aguuuggucucggugccacca

SEQ ID NO: 4258 - RNA, 21 nt, Artificial Sequence
  LDLR targeting guide sequence portion
aguuuugaguuucucuccacc

SEQ ID NO: 4259 - RNA, 21 nt, Artificial Sequence
  LDLR targeting guide sequence portion
auaaaacaaagcucuggcagg

SEQ ID NO: 4260 - RNA, 21 nt, Artificial Sequence
  LDLR targeting guide sequence portion
auaaaacaaggccggcgaggu

SEQ ID NO: 4261 - RNA, 21 nt, Artificial Sequence
  LDLR targeting guide sequence portion
auaaagaagaggcauuucaga

SEQ ID NO: 4262 - RNA, 21 nt, Artificial Sequence
  LDLR targeting guide sequence portion
auaaagacgacaauggcaguu

SEQ ID NO: 4263 - RNA, 21 nt, Artificial Sequence
  LDLR targeting guide sequence portion
auaaauaaauccuccagucug

SEQ ID NO: 4264 - RNA, 21 nt, Artificial Sequence
  LDLR targeting guide sequence portion
auaaauauuaagggugaccag

SEQ ID NO: 4265 - RNA, 21 nt, Artificial Sequence
  LDLR targeting guide sequence portion
auaaauccuccagucuggauc

SEQ ID NO: 4266 - RNA, 21 nt, Artificial Sequence
  LDLR targeting guide sequence portion
auaacaaaaaauccccacuau

SEQ ID NO: 4267 - RNA, 21 nt, Artificial Sequence
  LDLR targeting guide sequence portion
auaacacaaaugccaaaugua

SEQ ID NO: 4268 - RNA, 21 nt, Artificial Sequence
  LDLR targeting guide sequence portion
auaacccccuacacagggccc

SEQ ID NO: 4269 - RNA, 21 nt, Artificial Sequence
  LDLR targeting guide sequence portion
auaagagaaacaggcccgggg

SEQ ID NO: 4270 - RNA, 21 nt, Artificial Sequence
  LDLR targeting guide sequence portion
auaagccuuucugguuucgga

SEQ ID NO: 4271 - RNA, 21 nt, Artificial Sequence
  LDLR targeting guide sequence portion
auaaucauagcucacgacagc

SEQ ID NO: 4272 - RNA, 21 nt, Artificial Sequence
  LDLR targeting guide sequence portion
auacaacggggacaucauucu

SEQ ID NO: 4273 - RNA, 21 nt, Artificial Sequence
  LDLR targeting guide sequence portion
auacagcaaccaggguuugca

SEQ ID NO: 4274 - RNA, 21 nt, Artificial Sequence
  LDLR targeting guide sequence portion
auacagugguuuaaaaaguga

SEQ ID NO: 4275 - RNA, 21 nt, Artificial Sequence
  LDLR targeting guide sequence portion
auacauacaacggggacauca

SEQ ID NO: 4276 - RNA, 21 nt, Artificial Sequence
  LDLR targeting guide sequence portion
auacccaucaacgacaagauu

SEQ ID NO: 4277 - RNA, 21 nt, Artificial Sequence
  LDLR targeting guide sequence portion
auagaagagguaaacacguug

SEQ ID NO: 4278 - RNA, 21 nt, Artificial Sequence
  LDLR targeting guide sequence portion
auagaagguuuuuguagccug

SEQ ID NO: 4279 - RNA, 21 nt, Artificial Sequence
  LDLR targeting guide sequence portion
auagaaguggaagcacuaggu

SEQ ID NO: 4280 - RNA, 21 nt, Artificial Sequence
  LDLR targeting guide sequence portion
auagcucacgacagccucaaa

SEQ ID NO: 4281 - RNA, 21 nt, Artificial Sequence
  LDLR targeting guide sequence portion
auagucacugaacaaauacag

SEQ ID NO: 4282 - RNA, 21 nt, Artificial Sequence
  LDLR targeting guide sequence portion
auaguggggauuuuuuguuau

SEQ ID NO: 4283 - RNA, 21 nt, Artificial Sequence
  LDLR targeting guide sequence portion
auauaaaacaaagcucuggca

SEQ ID NO: 4284 - RNA, 21 nt, Artificial Sequence
  LDLR targeting guide sequence portion
auauauaaaacaaagcucugg

SEQ ID NO: 4285 - RNA, 21 nt, Artificial Sequence
  LDLR targeting guide sequence portion
auauauuuauucaucugggag

SEQ ID NO: 4286 - RNA, 21 nt, Artificial Sequence
  LDLR targeting guide sequence portion
auaucgagaacugccauuguc

SEQ ID NO: 4287 - RNA, 21 nt, Artificial Sequence
  LDLR targeting guide sequence portion
auauuaagggugaccagugac

SEQ ID NO: 4288 - RNA, 21 nt, Artificial Sequence
  LDLR targeting guide sequence portion
auauucacgaucacggcuuug

SEQ ID NO: 4289 - RNA, 21 nt, Artificial Sequence
  LDLR targeting guide sequence portion
auauuuauuaagugccugaga

SEQ ID NO: 4290 - RNA, 21 nt, Artificial Sequence
  LDLR targeting guide sequence portion
auauuuauucaucugggaggc

SEQ ID NO: 4291 - RNA, 21 nt, Artificial Sequence
  LDLR targeting guide sequence portion
aucaacgacaagauuggggaa

SEQ ID NO: 4292 - RNA, 21 nt, Artificial Sequence
  LDLR targeting guide sequence portion
aucacaggcacgugccaccgu

SEQ ID NO: 4293 - RNA, 21 nt, Artificial Sequence
  LDLR targeting guide sequence portion
aucacaguaagacauucaggc

SEQ ID NO: 4294 - RNA, 21 nt, Artificial Sequence
  LDLR targeting guide sequence portion
aucacggcuuugaagucccgg

SEQ ID NO: 4295 - RNA, 21 nt, Artificial Sequence
  LDLR targeting guide sequence portion
aucagcagcccauggccucug

SEQ ID NO: 4296 - RNA, 21 nt, Artificial Sequence
  LDLR targeting guide sequence portion
aucagcuggguacgguggcac

SEQ ID NO: 4297 - RNA, 21 nt, Artificial Sequence
  LDLR targeting guide sequence portion
aucagugcaacaguaacacgg

SEQ ID NO: 4298 - RNA, 21 nt, Artificial Sequence
  LDLR targeting guide sequence portion
aucauagcucacgacagccuc

SEQ ID NO: 4299 - RNA, 21 nt, Artificial Sequence
  LDLR targeting guide sequence portion
aucaugacccacccagugucu

SEQ ID NO: 4300 - RNA, 21 nt, Artificial Sequence
  LDLR targeting guide sequence portion
aucauucucccaaaaagcguu

SEQ ID NO: 4301 - RNA, 21 nt, Artificial Sequence
  LDLR targeting guide sequence portion
aucauuuccgacgccaugaau

SEQ ID NO: 4302 - RNA, 21 nt, Artificial Sequence
  LDLR targeting guide sequence portion
aucauuuggugaaugaguuug

SEQ ID NO: 4303 - RNA, 21 nt, Artificial Sequence
  LDLR targeting guide sequence portion
auccaccaaucucuaagccaa

SEQ ID NO: 4304 - RNA, 21 nt, Artificial Sequence
  LDLR targeting guide sequence portion
aucccaacacacacgacagaa

SEQ ID NO: 4305 - RNA, 21 nt, Artificial Sequence
  LDLR targeting guide sequence portion
aucccaacccaagccauugca

SEQ ID NO: 4306 - RNA, 21 nt, Artificial Sequence
  LDLR targeting guide sequence portion
aucccaggccagggaaagccc

SEQ ID NO: 4307 - RNA, 21 nt, Artificial Sequence
  LDLR targeting guide sequence portion
aucccaucccaacacacacga

SEQ ID NO: 4308 - RNA, 21 nt, Artificial Sequence
  LDLR targeting guide sequence portion
aucccaucucuacaaaaacca

SEQ ID NO: 4309 - RNA, 21 nt, Artificial Sequence
  LDLR targeting guide sequence portion
auccccacuaucuguacaggg

SEQ ID NO: 4310 - RNA, 21 nt, Artificial Sequence
  LDLR targeting guide sequence portion
auccccuccccuuucaucuuc

SEQ ID NO: 4311 - RNA, 21 nt, Artificial Sequence
  LDLR targeting guide sequence portion
aucccuugugacaucuucacg

SEQ ID NO: 4312 - RNA, 21 nt, Artificial Sequence
  LDLR targeting guide sequence portion
aucccuuuccuggcuuaagga

SEQ ID NO: 4313 - RNA, 21 nt, Artificial Sequence
  LDLR targeting guide sequence portion
auccgugguggcaccgagacc

SEQ ID NO: 4314 - RNA, 21 nt, Artificial Sequence
  LDLR targeting guide sequence portion
auccucaaacauggaagauga

SEQ ID NO: 4315 - RNA, 21 nt, Artificial Sequence
  LDLR targeting guide sequence portion
auccuccagucuggaucguuu

SEQ ID NO: 4316 - RNA, 21 nt, Artificial Sequence
  LDLR targeting guide sequence portion
auccucccaccucagccucgc

SEQ ID NO: 4317 - RNA, 21 nt, Artificial Sequence
  LDLR targeting guide sequence portion
auccucccgaccccuacccac

SEQ ID NO: 4318 - RNA, 21 nt, Artificial Sequence
  LDLR targeting guide sequence portion
auccugguccccccgggccug

SEQ ID NO: 4319 - RNA, 21 nt, Artificial Sequence
  LDLR targeting guide sequence portion
auccuucacgaggaaaggaag

SEQ ID NO: 4320 - RNA, 21 nt, Artificial Sequence
  LDLR targeting guide sequence portion
aucgagaacugccauugucgu

SEQ ID NO: 4321 - RNA, 21 nt, Artificial Sequence
  LDLR targeting guide sequence portion
aucgccguguuacuguugcac

SEQ ID NO: 4322 - RNA, 21 nt, Artificial Sequence
  LDLR targeting guide sequence portion
aucgugaauaucgagaacugc

SEQ ID NO: 4323 - RNA, 21 nt, Artificial Sequence
  LDLR targeting guide sequence portion
aucguuugacgggacuucagg

SEQ ID NO: 4324 - RNA, 21 nt, Artificial Sequence
  LDLR targeting guide sequence portion
aucucccagaagccacucaua

SEQ ID NO: 4325 - RNA, 21 nt, Artificial Sequence
  LDLR targeting guide sequence portion
aucucgcuuuguugcucaggc

SEQ ID NO: 4326 - RNA, 21 nt, Artificial Sequence
  LDLR targeting guide sequence portion
aucucuaagccaaaccccuaa

SEQ ID NO: 4327 - RNA, 21 nt, Artificial Sequence
  LDLR targeting guide sequence portion
aucugccuggagucccguccc

SEQ ID NO: 4328 - RNA, 21 nt, Artificial Sequence
  LDLR targeting guide sequence portion
aucugcuguuguguguugaaa

SEQ ID NO: 4329 - RNA, 21 nt, Artificial Sequence
  LDLR targeting guide sequence portion
aucuggcugaauccguggugg

SEQ ID NO: 4330 - RNA, 21 nt, Artificial Sequence
  LDLR targeting guide sequence portion
aucugggaggcagaacaggcu

SEQ ID NO: 4331 - RNA, 21 nt, Artificial Sequence
  LDLR targeting guide sequence portion
aucuguacagggacgcauuua

SEQ ID NO: 4332 - RNA, 21 nt, Artificial Sequence
  LDLR targeting guide sequence portion
aucuucacgcgggagucugac

SEQ ID NO: 4333 - RNA, 21 nt, Artificial Sequence
  LDLR targeting guide sequence portion
aucuuccauguuugaggauug

SEQ ID NO: 4334 - RNA, 21 nt, Artificial Sequence
  LDLR targeting guide sequence portion
aucuugucguugauggguaug

SEQ ID NO: 4335 - RNA, 21 nt, Artificial Sequence
  LDLR targeting guide sequence portion
augaaaggggaggggauguca

SEQ ID NO: 4336 - RNA, 21 nt, Artificial Sequence
  LDLR targeting guide sequence portion
augaagacccuauuucagaaa

SEQ ID NO: 4337 - RNA, 21 nt, Artificial Sequence
  LDLR targeting guide sequence portion
augaaucccuuuccuggcuua

SEQ ID NO: 4338 - RNA, 21 nt, Artificial Sequence
  LDLR targeting guide sequence portion
augaaugccggggacagagag

SEQ ID NO: 4339 - RNA, 21 nt, Artificial Sequence
  LDLR targeting guide sequence portion
augaauuuggccagacacagg

SEQ ID NO: 4340 - RNA, 21 nt, Artificial Sequence
  LDLR targeting guide sequence portion
augacaccuccauuucucucc

SEQ ID NO: 4341 - RNA, 21 nt, Artificial Sequence
  LDLR targeting guide sequence portion
augacccacccagugucuuuc

SEQ ID NO: 4342 - RNA, 21 nt, Artificial Sequence
  LDLR targeting guide sequence portion
augacguggcgugaacaucug

SEQ ID NO: 4343 - RNA, 21 nt, Artificial Sequence
  LDLR targeting guide sequence portion
augaggcagggccaggggguc

SEQ ID NO: 4344 - RNA, 21 nt, Artificial Sequence
  LDLR targeting guide sequence portion
augaguggcuucugggagaug

SEQ ID NO: 4345 - RNA, 21 nt, Artificial Sequence
  LDLR targeting guide sequence portion
augaguuuggucucggugcca

SEQ ID NO: 4346 - RNA, 21 nt, Artificial Sequence
  LDLR targeting guide sequence portion
augaucuggcugaauccgugg

SEQ ID NO: 4347 - RNA, 21 nt, Artificial Sequence
  LDLR targeting guide sequence portion
augaugccacuucccagaggc

SEQ ID NO: 4348 - RNA, 21 nt, Artificial Sequence
  LDLR targeting guide sequence portion
augauguccccguuguaugua

SEQ ID NO: 4349 - RNA, 21 nt, Artificial Sequence
  LDLR targeting guide sequence portion
augauuaugccacugcuuucc

SEQ ID NO: 4350 - RNA, 21 nt, Artificial Sequence
  LDLR targeting guide sequence portion
augauucgggggugacagggc

SEQ ID NO: 4351 - RNA, 21 nt, Artificial Sequence
  LDLR targeting guide sequence portion
augcaaaugccuccaagccau

SEQ ID NO: 4352 - RNA, 21 nt, Artificial Sequence
  LDLR targeting guide sequence portion
augcaagccuugcuagacagc

SEQ ID NO: 4353 - RNA, 21 nt, Artificial Sequence
  LDLR targeting guide sequence portion
augcaauggcuuggguuggga

SEQ ID NO: 4354 - RNA, 21 nt, Artificial Sequence
  LDLR targeting guide sequence portion
augcacggugaggccgggcgc

SEQ ID NO: 4355 - RNA, 21 nt, Artificial Sequence
  LDLR targeting guide sequence portion
augcauggugcaucagcagcc

SEQ ID NO: 4356 - RNA, 21 nt, Artificial Sequence
  LDLR targeting guide sequence portion
augccaaauguacacagugua

SEQ ID NO: 4357 - RNA, 21 nt, Artificial Sequence
  LDLR targeting guide sequence portion
augccacuucccagaggcaga

SEQ ID NO: 4358 - RNA, 21 nt, Artificial Sequence
  LDLR targeting guide sequence portion
augccggggacagagaggggc

SEQ ID NO: 4359 - RNA, 21 nt, Artificial Sequence
  LDLR targeting guide sequence portion
augccuccaagccauucacuu

SEQ ID NO: 4360 - RNA, 21 nt, Artificial Sequence
  LDLR targeting guide sequence portion
augccugagcucaaaccaucc

SEQ ID NO: 4361 - RNA, 21 nt, Artificial Sequence
  LDLR targeting guide sequence portion
augccuggccagaggccaugg

SEQ ID NO: 4362 - RNA, 21 nt, Artificial Sequence
  LDLR targeting guide sequence portion
augcgucccuguacagauagu

SEQ ID NO: 4363 - RNA, 21 nt, Artificial Sequence
  LDLR targeting guide sequence portion
augcuuuggucuucucugucu

SEQ ID NO: 4364 - RNA, 21 nt, Artificial Sequence
  LDLR targeting guide sequence portion
auggaagaugaaaggggaggg

SEQ ID NO: 4365 - RNA, 21 nt, Artificial Sequence
  LDLR targeting guide sequence portion
auggaaguggguaggggucgg

SEQ ID NO: 4366 - RNA, 21 nt, Artificial Sequence
  LDLR targeting guide sequence portion
auggaggugucauccuggucc

SEQ ID NO: 4367 - RNA, 21 nt, Artificial Sequence
  LDLR targeting guide sequence portion
auggcaccaacgggacccccu

SEQ ID NO: 4368 - RNA, 21 nt, Artificial Sequence
  LDLR targeting guide sequence portion
auggcaguucucgauauucac

SEQ ID NO: 4369 - RNA, 21 nt, Artificial Sequence
  LDLR targeting guide sequence portion
auggccucuggccaggcaugg

SEQ ID NO: 4370 - RNA, 21 nt, Artificial Sequence
  LDLR targeting guide sequence portion
auggcgaggcugaggugggag

SEQ ID NO: 4371 - RNA, 21 nt, Artificial Sequence
  LDLR targeting guide sequence portion
auggcgucggaaaugaucugg

SEQ ID NO: 4372 - RNA, 21 nt, Artificial Sequence
  LDLR targeting guide sequence portion
auggcuuggaggcauuugcau

SEQ ID NO: 4373 - RNA, 21 nt, Artificial Sequence
  LDLR targeting guide sequence portion
auggcuuggguugggauuuug

SEQ ID NO: 4374 - RNA, 21 nt, Artificial Sequence
  LDLR targeting guide sequence portion
augggaucccaggccagggaa

SEQ ID NO: 4375 - RNA, 21 nt, Artificial Sequence
  LDLR targeting guide sequence portion
augggaucucgcuuuguugcu

SEQ ID NO: 4376 - RNA, 21 nt, Artificial Sequence
  LDLR targeting guide sequence portion
augggcaccaggcuggugucc

SEQ ID NO: 4377 - RNA, 21 nt, Artificial Sequence
  LDLR targeting guide sequence portion
augggcacuguccgaagccug

SEQ ID NO: 4378 - RNA, 21 nt, Artificial Sequence
  LDLR targeting guide sequence portion
augggcugcugaugcaccaug

SEQ ID NO: 4379 - RNA, 21 nt, Artificial Sequence
  LDLR targeting guide sequence portion
auggguauguguuuaaaacau

SEQ ID NO: 4380 - RNA, 21 nt, Artificial Sequence
  LDLR targeting guide sequence portion
augggugucacuuuuuaaacc

SEQ ID NO: 4381 - RNA, 21 nt, Artificial Sequence
  LDLR targeting guide sequence portion
auggucagucuggaggaugac

SEQ ID NO: 4382 - RNA, 21 nt, Artificial Sequence
  LDLR targeting guide sequence portion
auggugcaucagcagcccaug

SEQ ID NO: 4383 - RNA, 21 nt, Artificial Sequence
  LDLR targeting guide sequence portion
augguuugagcucaggcauuu

SEQ ID NO: 4384 - RNA, 21 nt, Artificial Sequence
  LDLR targeting guide sequence portion
auguacaaagauuauuugcac

SEQ ID NO: 4385 - RNA, 21 nt, Artificial Sequence
  LDLR targeting guide sequence portion
auguacacaguguacaacucu

SEQ ID NO: 4386 - RNA, 21 nt, Artificial Sequence
  LDLR targeting guide sequence portion
auguaugaguggcuucuggga

SEQ ID NO: 4387 - RNA, 21 nt, Artificial Sequence
  LDLR targeting guide sequence portion
augucacaagggauuggcaau

SEQ ID NO: 4388 - RNA, 21 nt, Artificial Sequence
  LDLR targeting guide sequence portion
augucaggcccagagaagcaa

SEQ ID NO: 4389 - RNA, 21 nt, Artificial Sequence
  LDLR targeting guide sequence portion
auguccccguuguauguauga

SEQ ID NO: 4390 - RNA, 21 nt, Artificial Sequence
  LDLR targeting guide sequence portion
auguccgcccaccuagugcuu

SEQ ID NO: 4391 - RNA, 21 nt, Artificial Sequence
  LDLR targeting guide sequence portion
auguccggagagacagugaca

SEQ ID NO: 4392 - RNA, 21 nt, Artificial Sequence
  LDLR targeting guide sequence portion
auguguuuaaaacaugcacgg

SEQ ID NO: 4393 - RNA, 21 nt, Artificial Sequence
  LDLR targeting guide sequence portion
auguucacgccacgucauccu

SEQ ID NO: 4394 - RNA, 21 nt, Artificial Sequence
  LDLR targeting guide sequence portion
auguuugaggauugugucacg

SEQ ID NO: 4395 - RNA, 21 nt, Artificial Sequence
  LDLR targeting guide sequence portion
auguuuuaaacacauacccau

SEQ ID NO: 4396 - RNA, 21 nt, Artificial Sequence
  LDLR targeting guide sequence portion
auuaagggugaccagugacuc

SEQ ID NO: 4397 - RNA, 21 nt, Artificial Sequence
  LDLR targeting guide sequence portion
auuaagugccugagacacccg

SEQ ID NO: 4398 - RNA, 21 nt, Artificial Sequence
  LDLR targeting guide sequence portion
auuacaggcgugaggcaccug

SEQ ID NO: 4399 - RNA, 21 nt, Artificial Sequence
  LDLR targeting guide sequence portion
auuaugccacugcuuuccagc

SEQ ID NO: 4400 - RNA, 21 nt, Artificial Sequence
  LDLR targeting guide sequence portion
auuauuugcacgaacuggacu

SEQ ID NO: 4401 - RNA, 21 nt, Artificial Sequence
  LDLR targeting guide sequence portion
auuauuuugcacuguuuucug

SEQ ID NO: 4402 - RNA, 21 nt, Artificial Sequence
  LDLR targeting guide sequence portion
auucaaagacagagaagacca

SEQ ID NO: 4403 - RNA, 21 nt, Artificial Sequence
  LDLR targeting guide sequence portion
auucaccaaaugaugccacuu

SEQ ID NO: 4404 - RNA, 21 nt, Artificial Sequence
  LDLR targeting guide sequence portion
auucacgaucacggcuuugaa

SEQ ID NO: 4405 - RNA, 21 nt, Artificial Sequence
  LDLR targeting guide sequence portion
auucacuuccccaaucuuguc

SEQ ID NO: 4406 - RNA, 21 nt, Artificial Sequence
  LDLR targeting guide sequence portion
auucagccagaucauuuccga

SEQ ID NO: 4407 - RNA, 21 nt, Artificial Sequence
  LDLR targeting guide sequence portion
auucaggcuacaaaaaccuuc

SEQ ID NO: 4408 - RNA, 21 nt, Artificial Sequence
  LDLR targeting guide sequence portion
auucaucugggaggcagaaca

SEQ ID NO: 4409 - RNA, 21 nt, Artificial Sequence
  LDLR targeting guide sequence portion
auucauggcgucggaaaugau

SEQ ID NO: 4410 - RNA, 21 nt, Artificial Sequence
  LDLR targeting guide sequence portion
auucauugacacgggcuuucc

SEQ ID NO: 4411 - RNA, 21 nt, Artificial Sequence
  LDLR targeting guide sequence portion
auucccguggucuccuugcac

SEQ ID NO: 4412 - RNA, 21 nt, Artificial Sequence
  LDLR targeting guide sequence portion
auucgggggugacagggcaaa

SEQ ID NO: 4413 - RNA, 21 nt, Artificial Sequence
  LDLR targeting guide sequence portion
auucucccaaaaagcguugca

SEQ ID NO: 4414 - RNA, 21 nt, Artificial Sequence
  LDLR targeting guide sequence portion
auucucggggcccuguguagg

SEQ ID NO: 4415 - RNA, 21 nt, Artificial Sequence
  LDLR targeting guide sequence portion
auugacacgggcuuucccugg

SEQ ID NO: 4416 - RNA, 21 nt, Artificial Sequence
  LDLR targeting guide sequence portion
auugaucacaguaagacauuc

SEQ ID NO: 4417 - RNA, 21 nt, Artificial Sequence
  LDLR targeting guide sequence portion
auugcaugggcacuguccgaa

SEQ ID NO: 4418 - RNA, 21 nt, Artificial Sequence
  LDLR targeting guide sequence portion
auugccaaucccuugugacau

SEQ ID NO: 4419 - RNA, 21 nt, Artificial Sequence
  LDLR targeting guide sequence portion
auugccucugaaaugccucuu

SEQ ID NO: 4420 - RNA, 21 nt, Artificial Sequence
  LDLR targeting guide sequence portion
auugccugccagagcuuuguu

SEQ ID NO: 4421 - RNA, 21 nt, Artificial Sequence
  LDLR targeting guide sequence portion
auuggcaauuguccccaggga

SEQ ID NO: 4422 - RNA, 21 nt, Artificial Sequence
  LDLR targeting guide sequence portion
auuggggaagugaauggcuug

SEQ ID NO: 4423 - RNA, 21 nt, Artificial Sequence
  LDLR targeting guide sequence portion
auugguggaugaggcagggcc

SEQ ID NO: 4424 - RNA, 21 nt, Artificial Sequence
  LDLR targeting guide sequence portion
auuguccccagggacaaaaca

SEQ ID NO: 4425 - RNA, 21 nt, Artificial Sequence
  LDLR targeting guide sequence portion
auugucgucuuuauguccgcc

SEQ ID NO: 4426 - RNA, 21 nt, Artificial Sequence
  LDLR targeting guide sequence portion
auugugucacgguggagagaa

SEQ ID NO: 4427 - RNA, 21 nt, Artificial Sequence
  LDLR targeting guide sequence portion
auuuacgugcuccgaaaccag

SEQ ID NO: 4428 - RNA, 21 nt, Artificial Sequence
  LDLR targeting guide sequence portion
auuuauuaagugccugagaca

SEQ ID NO: 4429 - RNA, 21 nt, Artificial Sequence
  LDLR targeting guide sequence portion
auuuauucaucugggaggcag

SEQ ID NO: 4430 - RNA, 21 nt, Artificial Sequence
  LDLR targeting guide sequence portion
auuuauuuuugcaaacccugg

SEQ ID NO: 4431 - RNA, 21 nt, Artificial Sequence
  LDLR targeting guide sequence portion
auuucagaaagaaccugaagu

SEQ ID NO: 4432 - RNA, 21 nt, Artificial Sequence
  LDLR targeting guide sequence portion
auuucagaggcaauaaccccc

SEQ ID NO: 4433 - RNA, 21 nt, Artificial Sequence
  LDLR targeting guide sequence portion
auuuccgacgccaugaauccc

SEQ ID NO: 4434 - RNA, 21 nt, Artificial Sequence
  LDLR targeting guide sequence portion
auuucucuccaggaaguuuug

SEQ ID NO: 4435 - RNA, 21 nt, Artificial Sequence
  LDLR targeting guide sequence portion
auuucugaaauagggucuuca

SEQ ID NO: 4436 - RNA, 21 nt, Artificial Sequence
  LDLR targeting guide sequence portion
auuugaggcugucgugagcua

SEQ ID NO: 4437 - RNA, 21 nt, Artificial Sequence
  LDLR targeting guide sequence portion
auuugcacgaacuggacugug

SEQ ID NO: 4438 - RNA, 21 nt, Artificial Sequence
  LDLR targeting guide sequence portion
auuugcauagaaguggaagca

SEQ ID NO: 4439 - RNA, 21 nt, Artificial Sequence
  LDLR targeting guide sequence portion
auuuggccagacacaggugcc

SEQ ID NO: 4440 - RNA, 21 nt, Artificial Sequence
  LDLR targeting guide sequence portion
auuuggugaaugaguuugguc

SEQ ID NO: 4441 - RNA, 21 nt, Artificial Sequence
  LDLR targeting guide sequence portion
auuuguucagugacuauucuc

SEQ ID NO: 4442 - RNA, 21 nt, Artificial Sequence
  LDLR targeting guide sequence portion
auuuugcacuguuuucugucg

SEQ ID NO: 4443 - RNA, 21 nt, Artificial Sequence
  LDLR targeting guide sequence portion
auuuugguuucuuccuuuccu

SEQ ID NO: 4444 - RNA, 21 nt, Artificial Sequence
  LDLR targeting guide sequence portion
auuuuugcaaacccugguugc

SEQ ID NO: 4445 - RNA, 21 nt, Artificial Sequence
  LDLR targeting guide sequence portion
caaaaaauccccacuaucugu

SEQ ID NO: 4446 - RNA, 21 nt, Artificial Sequence
  LDLR targeting guide sequence portion
caaaaagcguugcacacaguc

SEQ ID NO: 4447 - RNA, 21 nt, Artificial Sequence
  LDLR targeting guide sequence portion
caaaaaguuaaaaaucagcug

SEQ ID NO: 4448 - RNA, 21 nt, Artificial Sequence
  LDLR targeting guide sequence portion
caaaacuuccuggagagaaau

SEQ ID NO: 4449 - RNA, 21 nt, Artificial Sequence
  LDLR targeting guide sequence portion
caaaaucccaacccaagccau

SEQ ID NO: 4450 - RNA, 21 nt, Artificial Sequence
  LDLR targeting guide sequence portion
caaacauaacaaaaaaucccc

SEQ ID NO: 4451 - RNA, 21 nt, Artificial Sequence
  LDLR targeting guide sequence portion
caaacauggaagaugaaaggg

SEQ ID NO: 4452 - RNA, 21 nt, Artificial Sequence
  LDLR targeting guide sequence portion
caaacccaccucgaaagacac

SEQ ID NO: 4453 - RNA, 21 nt, Artificial Sequence
  LDLR targeting guide sequence portion
caaaccccuaaacucaggagu

SEQ ID NO: 4454 - RNA, 21 nt, Artificial Sequence
  LDLR targeting guide sequence portion
caaacccugguugcuguauuu

SEQ ID NO: 4455 - RNA, 21 nt, Artificial Sequence
  LDLR targeting guide sequence portion
caaacgauccagacuggagga

SEQ ID NO: 4456 - RNA, 21 nt, Artificial Sequence
  LDLR targeting guide sequence portion
caaacucauucaccaaaugau

SEQ ID NO: 4457 - RNA, 21 nt, Artificial Sequence
  LDLR targeting guide sequence portion
caaagacagagaagaccaaag

SEQ ID NO: 4458 - RNA, 21 nt, Artificial Sequence
  LDLR targeting guide sequence portion
caaagauuauuugcacgaacu

SEQ ID NO: 4459 - RNA, 21 nt, Artificial Sequence
  LDLR targeting guide sequence portion
caaagcauugccugccagagc

SEQ ID NO: 4460 - RNA, 21 nt, Artificial Sequence
  LDLR targeting guide sequence portion
caaagccgugaucgugaauau

SEQ ID NO: 4461 - RNA, 21 nt, Artificial Sequence
  LDLR targeting guide sequence portion
caaagcucuggcaggcaaugc

SEQ ID NO: 4462 - RNA, 21 nt, Artificial Sequence
  LDLR targeting guide sequence portion
caaaggcuaaccuggcugucu

SEQ ID NO: 4463 - RNA, 21 nt, Artificial Sequence
  LDLR targeting guide sequence portion
caaagugcaaacauaacaaaa

SEQ ID NO: 4464 - RNA, 21 nt, Artificial Sequence
  LDLR targeting guide sequence portion
caaauacagcaaccaggguuu

SEQ ID NO: 4465 - RNA, 21 nt, Artificial Sequence
  LDLR targeting guide sequence portion
caaaugaugccacuucccaga

SEQ ID NO: 4466 - RNA, 21 nt, Artificial Sequence
  LDLR targeting guide sequence portion
caaaugccaaauguacacagu

SEQ ID NO: 4467 - RNA, 21 nt, Artificial Sequence
  LDLR targeting guide sequence portion
caaaugccuccaagccauuca

SEQ ID NO: 4468 - RNA, 21 nt, Artificial Sequence
  LDLR targeting guide sequence portion
caaaugccugagcucaaacca

SEQ ID NO: 4469 - RNA, 21 nt, Artificial Sequence
  LDLR targeting guide sequence portion
caaauguacacaguguacaac

SEQ ID NO: 4470 - RNA, 21 nt, Artificial Sequence
  LDLR targeting guide sequence portion
caaauucauuuuuuaagagau

SEQ ID NO: 4471 - RNA, 21 nt, Artificial Sequence
  LDLR targeting guide sequence portion
caacacacaacagcagauggc

SEQ ID NO: 4472 - RNA, 21 nt, Artificial Sequence
  LDLR targeting guide sequence portion
caacacacacgacagaaaaca

SEQ ID NO: 4473 - RNA, 21 nt, Artificial Sequence
  LDLR targeting guide sequence portion
caacagaugaagacccuauuu

SEQ ID NO: 4474 - RNA, 21 nt, Artificial Sequence
  LDLR targeting guide sequence portion
caacagcagauggcaccaacg

SEQ ID NO: 4475 - RNA, 21 nt, Artificial Sequence
  LDLR targeting guide sequence portion
caacaguaacacggcgauuuc

SEQ ID NO: 4476 - RNA, 21 nt, Artificial Sequence
  LDLR targeting guide sequence portion
caaccaggguuugcaaaaaua

SEQ ID NO: 4477 - RNA, 21 nt, Artificial Sequence
  LDLR targeting guide sequence portion
caacccaagccauugcauggg

SEQ ID NO: 4478 - RNA, 21 nt, Artificial Sequence
  LDLR targeting guide sequence portion
caaccugccccucucuguccc

SEQ ID NO: 4479 - RNA, 21 nt, Artificial Sequence
  LDLR targeting guide sequence portion
caacgacaagauuggggaagu

SEQ ID NO: 4480 - RNA, 21 nt, Artificial Sequence
  LDLR targeting guide sequence portion
caacgcuuuuugggagaauga

SEQ ID NO: 4481 - RNA, 21 nt, Artificial Sequence
  LDLR targeting guide sequence portion
caacgggacccccuggcccug

SEQ ID NO: 4482 - RNA, 21 nt, Artificial Sequence
  LDLR targeting guide sequence portion
caacggggacaucauucuccc

SEQ ID NO: 4483 - RNA, 21 nt, Artificial Sequence
  LDLR targeting guide sequence portion
caacguguuuaccucuucuau

SEQ ID NO: 4484 - RNA, 21 nt, Artificial Sequence
  LDLR targeting guide sequence portion
caacuccugaacucaagugau

SEQ ID NO: 4485 - RNA, 21 nt, Artificial Sequence
  LDLR targeting guide sequence portion
caacucugaacugagaaagug

SEQ ID NO: 4486 - RNA, 21 nt, Artificial Sequence
  LDLR targeting guide sequence portion
caagccauucacuuccccaau

SEQ ID NO: 4487 - RNA, 21 nt, Artificial Sequence
  LDLR targeting guide sequence portion
caagccauugcaugggcacug

SEQ ID NO: 4488 - RNA, 21 nt, Artificial Sequence
  LDLR targeting guide sequence portion
caagccuugcuagacagccag

SEQ ID NO: 4489 - RNA, 21 nt, Artificial Sequence
  LDLR targeting guide sequence portion
caaggagaccacgggaaugga

SEQ ID NO: 4490 - RNA, 21 nt, Artificial Sequence
  LDLR targeting guide sequence portion
caaggccggcgaggucucagg

SEQ ID NO: 4491 - RNA, 21 nt, Artificial Sequence
  LDLR targeting guide sequence portion
caaggcuugcauagaagaggu

SEQ ID NO: 4492 - RNA, 21 nt, Artificial Sequence
  LDLR targeting guide sequence portion
caagggauuggcaauuguccc

SEQ ID NO: 4493 - RNA, 21 nt, Artificial Sequence
  LDLR targeting guide sequence portion
caagguaaccgggugucucag

SEQ ID NO: 4494 - RNA, 21 nt, Artificial Sequence
  LDLR targeting guide sequence portion
caagugauccagcucagccuc

SEQ ID NO: 4495 - RNA, 21 nt, Artificial Sequence
  LDLR targeting guide sequence portion
caaguggcuuucaacacacaa

SEQ ID NO: 4496 - RNA, 21 nt, Artificial Sequence
  LDLR targeting guide sequence portion
caauaacccccuacacagggc

SEQ ID NO: 4497 - RNA, 21 nt, Artificial Sequence
  LDLR targeting guide sequence portion
caaucccuugugacaucuuca

SEQ ID NO: 4498 - RNA, 21 nt, Artificial Sequence
  LDLR targeting guide sequence portion
caauccucaaacauggaagau

SEQ ID NO: 4499 - RNA, 21 nt, Artificial Sequence
  LDLR targeting guide sequence portion
caaucucuaagccaaaccccu

SEQ ID NO: 4500 - RNA, 21 nt, Artificial Sequence
  LDLR targeting guide sequence portion
caaucuugucguugaugggua

SEQ ID NO: 4501 - RNA, 21 nt, Artificial Sequence
  LDLR targeting guide sequence portion
caaugaaugccggggacagag

SEQ ID NO: 4502 - RNA, 21 nt, Artificial Sequence
  LDLR targeting guide sequence portion
caaugcuuuggucuucucugu

SEQ ID NO: 4503 - RNA, 21 nt, Artificial Sequence
  LDLR targeting guide sequence portion
caauggcaguucucgauauuc

SEQ ID NO: 4504 - RNA, 21 nt, Artificial Sequence
  LDLR targeting guide sequence portion
caauggcuuggguugggauuu

SEQ ID NO: 4505 - RNA, 21 nt, Artificial Sequence
  LDLR targeting guide sequence portion
caauugccaaucccuugugac

SEQ ID NO: 4506 - RNA, 21 nt, Artificial Sequence
  LDLR targeting guide sequence portion
caauuguccccagggacaaaa

SEQ ID NO: 4507 - RNA, 21 nt, Artificial Sequence
  LDLR targeting guide sequence portion
cacaaaugccaaauguacaca

SEQ ID NO: 4508 - RNA, 21 nt, Artificial Sequence
  LDLR targeting guide sequence portion
cacaacagcagauggcaccaa

SEQ ID NO: 4509 - RNA, 21 nt, Artificial Sequence
  LDLR targeting guide sequence portion
cacaagggauuggcaauuguc

SEQ ID NO: 4510 - RNA, 21 nt, Artificial Sequence
  LDLR targeting guide sequence portion
cacaauccucaaacauggaag

SEQ ID NO: 4511 - RNA, 21 nt, Artificial Sequence
  LDLR targeting guide sequence portion
cacacaacagcagauggcacc

SEQ ID NO: 4512 - RNA, 21 nt, Artificial Sequence
  LDLR targeting guide sequence portion
cacacacgacagaaaacagug

SEQ ID NO: 4513 - RNA, 21 nt, Artificial Sequence
  LDLR targeting guide sequence portion
cacacaguccaguucgugcaa

SEQ ID NO: 4514 - RNA, 21 nt, Artificial Sequence
  LDLR targeting guide sequence portion
cacaccugggugcaggccacg

SEQ ID NO: 4515 - RNA, 21 nt, Artificial Sequence
  LDLR targeting guide sequence portion
cacacgacagaaaacagugca

SEQ ID NO: 4516 - RNA, 21 nt, Artificial Sequence
  LDLR targeting guide sequence portion
cacaggcacgugccaccguac

SEQ ID NO: 4517 - RNA, 21 nt, Artificial Sequence
  LDLR targeting guide sequence portion
cacagggccccgagaauaguc

SEQ ID NO: 4518 - RNA, 21 nt, Artificial Sequence
  LDLR targeting guide sequence portion
cacaggugccucacgccugua

SEQ ID NO: 4519 - RNA, 21 nt, Artificial Sequence
  LDLR targeting guide sequence portion
cacaguaagacauucaggcua

SEQ ID NO: 4520 - RNA, 21 nt, Artificial Sequence
  LDLR targeting guide sequence portion
cacaguccaguucgugcaaau

SEQ ID NO: 4521 - RNA, 21 nt, Artificial Sequence
  LDLR targeting guide sequence portion
cacaguguacaacucugaacu

SEQ ID NO: 4522 - RNA, 21 nt, Artificial Sequence
  LDLR targeting guide sequence portion
cacaguguuuugucccugggg

SEQ ID NO: 4523 - RNA, 21 nt, Artificial Sequence
  LDLR targeting guide sequence portion
cacauacccaucaacgacaag

SEQ ID NO: 4524 - RNA, 21 nt, Artificial Sequence
  LDLR targeting guide sequence portion
caccaaaugaugccacuuccc

SEQ ID NO: 4525 - RNA, 21 nt, Artificial Sequence
  LDLR targeting guide sequence portion
caccaacgggacccccuggcc

SEQ ID NO: 4526 - RNA, 21 nt, Artificial Sequence
  LDLR targeting guide sequence portion
caccaaucucuaagccaaacc

SEQ ID NO: 4527 - RNA, 21 nt, Artificial Sequence
  LDLR targeting guide sequence portion
caccacggauucagccagauc

SEQ ID NO: 4528 - RNA, 21 nt, Artificial Sequence
  LDLR targeting guide sequence portion
caccagccuggugcccauccu

SEQ ID NO: 4529 - RNA, 21 nt, Artificial Sequence
  LDLR targeting guide sequence portion
caccaggcugguguccugaca

SEQ ID NO: 4530 - RNA, 21 nt, Artificial Sequence
  LDLR targeting guide sequence portion
cacccagguguggcugucagg

SEQ ID NO: 4531 - RNA, 21 nt, Artificial Sequence
  LDLR targeting guide sequence portion
cacccagugucuuucgaggug

SEQ ID NO: 4532 - RNA, 21 nt, Artificial Sequence
  LDLR targeting guide sequence portion
cacccaucucccagaagccac

SEQ ID NO: 4533 - RNA, 21 nt, Artificial Sequence
  LDLR targeting guide sequence portion
cacccccgaaucaugacccac

SEQ ID NO: 4534 - RNA, 21 nt, Artificial Sequence
  LDLR targeting guide sequence portion
cacccgguuaccuuggccgug

SEQ ID NO: 4535 - RNA, 21 nt, Artificial Sequence
  LDLR targeting guide sequence portion
cacccuuaauauuuauuaagu

SEQ ID NO: 4536 - RNA, 21 nt, Artificial Sequence
  LDLR targeting guide sequence portion
caccgagaccaaacucauuca

SEQ ID NO: 4537 - RNA, 21 nt, Artificial Sequence
  LDLR targeting guide sequence portion
caccguacccagcugauuuuu

SEQ ID NO: 4538 - RNA, 21 nt, Artificial Sequence
  LDLR targeting guide sequence portion
caccgugacacaauccucaaa

SEQ ID NO: 4539 - RNA, 21 nt, Artificial Sequence
  LDLR targeting guide sequence portion
caccgugcauguuuuaaacac

SEQ ID NO: 4540 - RNA, 21 nt, Artificial Sequence
  LDLR targeting guide sequence portion
caccuagugcuuccacuucua

SEQ ID NO: 4541 - RNA, 21 nt, Artificial Sequence
  LDLR targeting guide sequence portion
caccucagccucgccaugccu

SEQ ID NO: 4542 - RNA, 21 nt, Artificial Sequence
  LDLR targeting guide sequence portion
caccuccauuucucuccagga

SEQ ID NO: 4543 - RNA, 21 nt, Artificial Sequence
  LDLR targeting guide sequence portion
caccucgaaagacacugggug

SEQ ID NO: 4544 - RNA, 21 nt, Artificial Sequence
  LDLR targeting guide sequence portion
caccugggugcaggccacgug

SEQ ID NO: 4545 - RNA, 21 nt, Artificial Sequence
  LDLR targeting guide sequence portion
caccugugucuggccaaauuc

SEQ ID NO: 4546 - RNA, 21 nt, Artificial Sequence
  LDLR targeting guide sequence portion
cacgaacuggacugugugcaa

SEQ ID NO: 4547 - RNA, 21 nt, Artificial Sequence
  LDLR targeting guide sequence portion
cacgacagaaaacagugcaaa

SEQ ID NO: 4548 - RNA, 21 nt, Artificial Sequence
  LDLR targeting guide sequence portion
cacgacagccucaaaugccug

SEQ ID NO: 4549 - RNA, 21 nt, Artificial Sequence
  LDLR targeting guide sequence portion
cacgaggaaaggaagaaacca

SEQ ID NO: 4550 - RNA, 21 nt, Artificial Sequence
  LDLR targeting guide sequence portion
cacgaucacggcuuugaaguc

SEQ ID NO: 4551 - RNA, 21 nt, Artificial Sequence
  LDLR targeting guide sequence portion
cacgccacgucauccuccaga

SEQ ID NO: 4552 - RNA, 21 nt, Artificial Sequence
  LDLR targeting guide sequence portion
cacgcgggagucugacggagg

SEQ ID NO: 4553 - RNA, 21 nt, Artificial Sequence
  LDLR targeting guide sequence portion
cacggauucagccagaucauu

SEQ ID NO: 4554 - RNA, 21 nt, Artificial Sequence
  LDLR targeting guide sequence portion
cacggccaagguaaccgggug

SEQ ID NO: 4555 - RNA, 21 nt, Artificial Sequence
  LDLR targeting guide sequence portion
cacggcgauuucagaaagaac

SEQ ID NO: 4556 - RNA, 21 nt, Artificial Sequence
  LDLR targeting guide sequence portion
cacggcuuugaagucccgguc

SEQ ID NO: 4557 - RNA, 21 nt, Artificial Sequence
  LDLR targeting guide sequence portion
cacgggaauggaaguggguag

SEQ ID NO: 4558 - RNA, 21 nt, Artificial Sequence
  LDLR targeting guide sequence portion
cacgggcuuucccuggccugg

SEQ ID NO: 4559 - RNA, 21 nt, Artificial Sequence
  LDLR targeting guide sequence portion
cacggugaggccgggcgcagu

SEQ ID NO: 4560 - RNA, 21 nt, Artificial Sequence
  LDLR targeting guide sequence portion
cacgguggagagaaacucaaa

SEQ ID NO: 4561 - RNA, 21 nt, Artificial Sequence
  LDLR targeting guide sequence portion
cacguaaaugcgucccuguac

SEQ ID NO: 4562 - RNA, 21 nt, Artificial Sequence
  LDLR targeting guide sequence portion
cacgucauccuccagacugac

SEQ ID NO: 4563 - RNA, 21 nt, Artificial Sequence
  LDLR targeting guide sequence portion
cacgugccaccguacccagcu

SEQ ID NO: 4564 - RNA, 21 nt, Artificial Sequence
  LDLR targeting guide sequence portion
cacguggccugcacccaggug

SEQ ID NO: 4565 - RNA, 21 nt, Artificial Sequence
  LDLR targeting guide sequence portion
cacguguccucacggccaagg

SEQ ID NO: 4566 - RNA, 21 nt, Artificial Sequence
  LDLR targeting guide sequence portion
cacguugacuccugaguuuag

SEQ ID NO: 4567 - RNA, 21 nt, Artificial Sequence
  LDLR targeting guide sequence portion
cacuaggugggcggacauaaa

SEQ ID NO: 4568 - RNA, 21 nt, Artificial Sequence
  LDLR targeting guide sequence portion
cacuaucuguacagggacgca

SEQ ID NO: 4569 - RNA, 21 nt, Artificial Sequence
  LDLR targeting guide sequence portion
cacucauacauacaacgggga

SEQ ID NO: 4570 - RNA, 21 nt, Artificial Sequence
  LDLR targeting guide sequence portion
cacugaacaaauacagcaacc

SEQ ID NO: 4571 - RNA, 21 nt, Artificial Sequence
  LDLR targeting guide sequence portion
cacugauguccggagagacag

SEQ ID NO: 4572 - RNA, 21 nt, Artificial Sequence
  LDLR targeting guide sequence portion
cacugcgcccggccucaccgu

SEQ ID NO: 4573 - RNA, 21 nt, Artificial Sequence
  LDLR targeting guide sequence portion
cacugggugggucaugauucg

SEQ ID NO: 4574 - RNA, 21 nt, Artificial Sequence
  LDLR targeting guide sequence portion
cacuggucacccuuaauauuu

SEQ ID NO: 4575 - RNA, 21 nt, Artificial Sequence
  LDLR targeting guide sequence portion
cacuguauagaagguuuuugu

SEQ ID NO: 4576 - RNA, 21 nt, Artificial Sequence
  LDLR targeting guide sequence portion
cacuguccgaagccuguucug

SEQ ID NO: 4577 - RNA, 21 nt, Artificial Sequence
  LDLR targeting guide sequence portion
cacugucucuccggacaucag

SEQ ID NO: 4578 - RNA, 21 nt, Artificial Sequence
  LDLR targeting guide sequence portion
cacuguguacauuuggcauuu

SEQ ID NO: 4579 - RNA, 21 nt, Artificial Sequence
  LDLR targeting guide sequence portion
cacuguuuucugucgugugug

SEQ ID NO: 4580 - RNA, 21 nt, Artificial Sequence
  LDLR targeting guide sequence portion
cacuuaauaaauauuaagggu

SEQ ID NO: 4581 - RNA, 21 nt, Artificial Sequence
  LDLR targeting guide sequence portion
cacuuccauucccguggucuc

SEQ ID NO: 4582 - RNA, 21 nt, Artificial Sequence
  LDLR targeting guide sequence portion
cacuucccagaggcagagccu

SEQ ID NO: 4583 - RNA, 21 nt, Artificial Sequence
  LDLR targeting guide sequence portion
cacuuccccaaucuugucguu

SEQ ID NO: 4584 - RNA, 21 nt, Artificial Sequence
  LDLR targeting guide sequence portion
cacuucuaugcaaaugccucc

SEQ ID NO: 4585 - RNA, 21 nt, Artificial Sequence
  LDLR targeting guide sequence portion
cacuugcuucucugggccuga

SEQ ID NO: 4586 - RNA, 21 nt, Artificial Sequence
  LDLR targeting guide sequence portion
cacuuucucaguucagaguug

SEQ ID NO: 4587 - RNA, 21 nt, Artificial Sequence
  LDLR targeting guide sequence portion
cacuuugggaggcugagcugg

SEQ ID NO: 4588 - RNA, 21 nt, Artificial Sequence
  LDLR targeting guide sequence portion
cacuuuuuaaaccacuguaua

SEQ ID NO: 4589 - RNA, 21 nt, Artificial Sequence
  LDLR targeting guide sequence portion
cagaaagaaccugaagucccg

SEQ ID NO: 4590 - RNA, 21 nt, Artificial Sequence
  LDLR targeting guide sequence portion
cagaaaggcuuaucacgguuc

SEQ ID NO: 4591 - RNA, 21 nt, Artificial Sequence
  LDLR targeting guide sequence portion
cagaacaggcuucggacagug

SEQ ID NO: 4592 - RNA, 21 nt, Artificial Sequence
  LDLR targeting guide sequence portion
cagaacccuuccugagaccuc

SEQ ID NO: 4593 - RNA, 21 nt, Artificial Sequence
  LDLR targeting guide sequence portion
cagaagccacucauacauaca

SEQ ID NO: 4594 - RNA, 21 nt, Artificial Sequence
  LDLR targeting guide sequence portion
cagacacaggugccucacgcc

SEQ ID NO: 4595 - RNA, 21 nt, Artificial Sequence
  LDLR targeting guide sequence portion
cagacucccgcgugaagaugu

SEQ ID NO: 4596 - RNA, 21 nt, Artificial Sequence
  LDLR targeting guide sequence portion
cagagaagaccaaagcauugc

SEQ ID NO: 4597 - RNA, 21 nt, Artificial Sequence
  LDLR targeting guide sequence portion
cagagaagcaaguggcuuuca

SEQ ID NO: 4598 - RNA, 21 nt, Artificial Sequence
  LDLR targeting guide sequence portion
cagagaggggcagguugaccg

SEQ ID NO: 4599 - RNA, 21 nt, Artificial Sequence
  LDLR targeting guide sequence portion
cagagccugagucacugguca

SEQ ID NO: 4600 - RNA, 21 nt, Artificial Sequence
  LDLR targeting guide sequence portion
cagaggcaauaacccccuaca

SEQ ID NO: 4601 - RNA, 21 nt, Artificial Sequence
  LDLR targeting guide sequence portion
cagaggcagagccugagucac

SEQ ID NO: 4602 - RNA, 21 nt, Artificial Sequence
  LDLR targeting guide sequence portion
cagaggccaugggcugcugau

SEQ ID NO: 4603 - RNA, 21 nt, Artificial Sequence
  LDLR targeting guide sequence portion
cagaguuguacacuguguaca

SEQ ID NO: 4604 - RNA, 21 nt, Artificial Sequence
  LDLR targeting guide sequence portion
cagauaguggggauuuuuugu

SEQ ID NO: 4605 - RNA, 21 nt, Artificial Sequence
  LDLR targeting guide sequence portion
cagaucauuuccgacgccaug

SEQ ID NO: 4606 - RNA, 21 nt, Artificial Sequence
  LDLR targeting guide sequence portion
cagaugaagacccuauuucag

SEQ ID NO: 4607 - RNA, 21 nt, Artificial Sequence
  LDLR targeting guide sequence portion
cagauggcaccaacgggaccc

SEQ ID NO: 4608 - RNA, 21 nt, Artificial Sequence
  LDLR targeting guide sequence portion
cagauggucagucuggaggau

SEQ ID NO: 4609 - RNA, 21 nt, Artificial Sequence
  LDLR targeting guide sequence portion
cagauguucacgccacgucau

SEQ ID NO: 4610 - RNA, 21 nt, Artificial Sequence
  LDLR targeting guide sequence portion
cagcaaccaggguuugcaaaa

SEQ ID NO: 4611 - RNA, 21 nt, Artificial Sequence
  LDLR targeting guide sequence portion
cagcacuuugggaggcugagc

SEQ ID NO: 4612 - RNA, 21 nt, Artificial Sequence
  LDLR targeting guide sequence portion
cagcagauggcaccaacggga

SEQ ID NO: 4613 - RNA, 21 nt, Artificial Sequence
  LDLR targeting guide sequence portion
cagcagcccauggccucuggc

SEQ ID NO: 4614 - RNA, 21 nt, Artificial Sequence
  LDLR targeting guide sequence portion
cagccacaccugggugcaggc

SEQ ID NO: 4615 - RNA, 21 nt, Artificial Sequence
  LDLR targeting guide sequence portion
cagccagaucauuuccgacgc

SEQ ID NO: 4616 - RNA, 21 nt, Artificial Sequence
  LDLR targeting guide sequence portion
cagccagguuagccuuugccc

SEQ ID NO: 4617 - RNA, 21 nt, Artificial Sequence
  LDLR targeting guide sequence portion
cagcccauggccucuggccag

SEQ ID NO: 4618 - RNA, 21 nt, Artificial Sequence
  LDLR targeting guide sequence portion
cagccucaaaugccugagcuc

SEQ ID NO: 4619 - RNA, 21 nt, Artificial Sequence
  LDLR targeting guide sequence portion
cagccuccgucagacucccgc

SEQ ID NO: 4620 - RNA, 21 nt, Artificial Sequence
  LDLR targeting guide sequence portion
cagccucgccaugccuggcca

SEQ ID NO: 4621 - RNA, 21 nt, Artificial Sequence
  LDLR targeting guide sequence portion
cagccuggugcccauccuccc

SEQ ID NO: 4622 - RNA, 21 nt, Artificial Sequence
  LDLR targeting guide sequence portion
cagcuggguacgguggcacgu

SEQ ID NO: 4623 - RNA, 21 nt, Artificial Sequence
  LDLR targeting guide sequence portion
caggaaagggauucauggcgu

SEQ ID NO: 4624 - RNA, 21 nt, Artificial Sequence
  LDLR targeting guide sequence portion
caggaaggguucugggcaggg

SEQ ID NO: 4625 - RNA, 21 nt, Artificial Sequence
  LDLR targeting guide sequence portion
caggaaguuuugaguuucucu

SEQ ID NO: 4626 - RNA, 21 nt, Artificial Sequence
  LDLR targeting guide sequence portion
caggacaccagccuggugccc

SEQ ID NO: 4627 - RNA, 21 nt, Artificial Sequence
  LDLR targeting guide sequence portion
caggagucaacguguuuaccu

SEQ ID NO: 4628 - RNA, 21 nt, Artificial Sequence
  LDLR targeting guide sequence portion
caggaguuggagaccaggccu

SEQ ID NO: 4629 - RNA, 21 nt, Artificial Sequence
  LDLR targeting guide sequence portion
caggaugacaccuccauuucu

SEQ ID NO: 4630 - RNA, 21 nt, Artificial Sequence
  LDLR targeting guide sequence portion
caggcaaugcuuuggucuucu

SEQ ID NO: 4631 - RNA, 21 nt, Artificial Sequence
  LDLR targeting guide sequence portion
caggcacgugccaccguaccc

SEQ ID NO: 4632 - RNA, 21 nt, Artificial Sequence
  LDLR targeting guide sequence portion
caggcacuuaauaaauauuaa

SEQ ID NO: 4633 - RNA, 21 nt, Artificial Sequence
  LDLR targeting guide sequence portion
caggcagauguucacgccacg

SEQ ID NO: 4634 - RNA, 21 nt, Artificial Sequence
  LDLR targeting guide sequence portion
caggcauggcgaggcugaggu

SEQ ID NO: 4635 - RNA, 21 nt, Artificial Sequence
  LDLR targeting guide sequence portion
caggcauuugaggcugucgug

SEQ ID NO: 4636 - RNA, 21 nt, Artificial Sequence
  LDLR targeting guide sequence portion
caggccacguguccucacggc

SEQ ID NO: 4637 - RNA, 21 nt, Artificial Sequence
  LDLR targeting guide sequence portion
caggccagggaaagcccgugu

SEQ ID NO: 4638 - RNA, 21 nt, Artificial Sequence
  LDLR targeting guide sequence portion
caggcccagagaagcaagugg

SEQ ID NO: 4639 - RNA, 21 nt, Artificial Sequence
  LDLR targeting guide sequence portion
caggcccggggggaccaggau

SEQ ID NO: 4640 - RNA, 21 nt, Artificial Sequence
  LDLR targeting guide sequence portion
caggccugagcaacaaagcga

SEQ ID NO: 4641 - RNA, 21 nt, Artificial Sequence
  LDLR targeting guide sequence portion
caggccuggucuccaacuccu

SEQ ID NO: 4642 - RNA, 21 nt, Artificial Sequence
  LDLR targeting guide sequence portion
caggcgugaggcaccuguguc

SEQ ID NO: 4643 - RNA, 21 nt, Artificial Sequence
  LDLR targeting guide sequence portion
caggcuacaaaaaccuucuau

SEQ ID NO: 4644 - RNA, 21 nt, Artificial Sequence
  LDLR targeting guide sequence portion
caggcucugccucugggaagu

SEQ ID NO: 4645 - RNA, 21 nt, Artificial Sequence
  LDLR targeting guide sequence portion
caggcuggaaagcaguggcau

SEQ ID NO: 4646 - RNA, 21 nt, Artificial Sequence
  LDLR targeting guide sequence portion
caggcugguguccugacagcc

SEQ ID NO: 4647 - RNA, 21 nt, Artificial Sequence
  LDLR targeting guide sequence portion
caggcuucggacagugcccau

SEQ ID NO: 4648 - RNA, 21 nt, Artificial Sequence
  LDLR targeting guide sequence portion
cagggaaagcccgugucaaug

SEQ ID NO: 4649 - RNA, 21 nt, Artificial Sequence
  LDLR targeting guide sequence portion
cagggaaccgugauaagccuu

SEQ ID NO: 4650 - RNA, 21 nt, Artificial Sequence
  LDLR targeting guide sequence portion
cagggacgcauuuacgugcuc

SEQ ID NO: 4651 - RNA, 21 nt, Artificial Sequence
  LDLR targeting guide sequence portion
cagggacgggacuccaggcag

SEQ ID NO: 4652 - RNA, 21 nt, Artificial Sequence
  LDLR targeting guide sequence portion
cagggcaaaggcuaaccuggc

SEQ ID NO: 4653 - RNA, 21 nt, Artificial Sequence
  LDLR targeting guide sequence portion
cagggccagggggucccguug

SEQ ID NO: 4654 - RNA, 21 nt, Artificial Sequence
  LDLR targeting guide sequence portion
cagggccccgagaauagucac

SEQ ID NO: 4655 - RNA, 21 nt, Artificial Sequence
  LDLR targeting guide sequence portion
cagggggucccguuggugcca

SEQ ID NO: 4656 - RNA, 21 nt, Artificial Sequence
  LDLR targeting guide sequence portion
cagguguggcugucaggacac

SEQ ID NO: 4657 - RNA, 21 nt, Artificial Sequence
  LDLR targeting guide sequence portion
cagguuagccuuugcccuguc

SEQ ID NO: 4658 - RNA, 21 nt, Artificial Sequence
  LDLR targeting guide sequence portion
cagguucuuucugaaaucgcc

SEQ ID NO: 4659 - RNA, 21 nt, Artificial Sequence
  LDLR targeting guide sequence portion
cagguugaccgggacuucaaa

SEQ ID NO: 4660 - RNA, 21 nt, Artificial Sequence
  LDLR targeting guide sequence portion
caguaacacggcgauuucaga

SEQ ID NO: 4661 - RNA, 21 nt, Artificial Sequence
  LDLR targeting guide sequence portion
caguaagacauucaggcuaca

SEQ ID NO: 4662 - RNA, 21 nt, Artificial Sequence
  LDLR targeting guide sequence portion
caguccaguucgugcaaauaa

SEQ ID NO: 4663 - RNA, 21 nt, Artificial Sequence
  LDLR targeting guide sequence portion
cagucuggaggaugacguggc

SEQ ID NO: 4664 - RNA, 21 nt, Artificial Sequence
  LDLR targeting guide sequence portion
cagucuggaucguuugacggg

SEQ ID NO: 4665 - RNA, 21 nt, Artificial Sequence
  LDLR targeting guide sequence portion
cagugacagccuccgucagac

SEQ ID NO: 4666 - RNA, 21 nt, Artificial Sequence
  LDLR targeting guide sequence portion
cagugacuauucucggggccc

SEQ ID NO: 4667 - RNA, 21 nt, Artificial Sequence
  LDLR targeting guide sequence portion
cagugacucaggcucugccuc

SEQ ID NO: 4668 - RNA, 21 nt, Artificial Sequence
  LDLR targeting guide sequence portion
cagugcaaaauaauaacacaa

SEQ ID NO: 4669 - RNA, 21 nt, Artificial Sequence
  LDLR targeting guide sequence portion
cagugcaacaguaacacggcg

SEQ ID NO: 4670 - RNA, 21 nt, Artificial Sequence
  LDLR targeting guide sequence portion
cagugcagggaaccgugauaa

SEQ ID NO: 4671 - RNA, 21 nt, Artificial Sequence
  LDLR targeting guide sequence portion
cagugcccaugcaauggcuug

SEQ ID NO: 4672 - RNA, 21 nt, Artificial Sequence
  LDLR targeting guide sequence portion
cagugguuuaaaaagugacac

SEQ ID NO: 4673 - RNA, 21 nt, Artificial Sequence
  LDLR targeting guide sequence portion
caguguacaacucugaacuga

SEQ ID NO: 4674 - RNA, 21 nt, Artificial Sequence
  LDLR targeting guide sequence portion
cagugucuuucgagguggguu

SEQ ID NO: 4675 - RNA, 21 nt, Artificial Sequence
  LDLR targeting guide sequence portion
caguguuuugucccuggggac

SEQ ID NO: 4676 - RNA, 21 nt, Artificial Sequence
  LDLR targeting guide sequence portion
caguucagaguuguacacugu

SEQ ID NO: 4677 - RNA, 21 nt, Artificial Sequence
  LDLR targeting guide sequence portion
caguucgugcaaauaaucuuu

SEQ ID NO: 4678 - RNA, 21 nt, Artificial Sequence
  LDLR targeting guide sequence portion
caguucucgauauucacgauc

SEQ ID NO: 4679 - RNA, 21 nt, Artificial Sequence
  LDLR targeting guide sequence portion
caguuucaaccaauauacaaa

SEQ ID NO: 4680 - RNA, 21 nt, Artificial Sequence
  LDLR targeting guide sequence portion
cauaaagaagaggcauuucag

SEQ ID NO: 4681 - RNA, 21 nt, Artificial Sequence
  LDLR targeting guide sequence portion
cauaaagacgacaauggcagu

SEQ ID NO: 4682 - RNA, 21 nt, Artificial Sequence
  LDLR targeting guide sequence portion
cauaacaaaaaauccccacua

SEQ ID NO: 4683 - RNA, 21 nt, Artificial Sequence
  LDLR targeting guide sequence portion
cauaaucauagcucacgacag

SEQ ID NO: 4684 - RNA, 21 nt, Artificial Sequence
  LDLR targeting guide sequence portion
cauacaacggggacaucauuc

SEQ ID NO: 4685 - RNA, 21 nt, Artificial Sequence
  LDLR targeting guide sequence portion
cauacauacaacggggacauc

SEQ ID NO: 4686 - RNA, 21 nt, Artificial Sequence
  LDLR targeting guide sequence portion
cauacccaucaacgacaagau

SEQ ID NO: 4687 - RNA, 21 nt, Artificial Sequence
  LDLR targeting guide sequence portion
cauagaagagguaaacacguu

SEQ ID NO: 4688 - RNA, 21 nt, Artificial Sequence
  LDLR targeting guide sequence portion
cauagaaguggaagcacuagg

SEQ ID NO: 4689 - RNA, 21 nt, Artificial Sequence
  LDLR targeting guide sequence portion
cauagcucacgacagccucaa

SEQ ID NO: 4690 - RNA, 21 nt, Artificial Sequence
  LDLR targeting guide sequence portion
caucaacgacaagauugggga

SEQ ID NO: 4691 - RNA, 21 nt, Artificial Sequence
  LDLR targeting guide sequence portion
caucagcagcccauggccucu

SEQ ID NO: 4692 - RNA, 21 nt, Artificial Sequence
  LDLR targeting guide sequence portion
caucagugcaacaguaacacg

SEQ ID NO: 4693 - RNA, 21 nt, Artificial Sequence
  LDLR targeting guide sequence portion
caucauucucccaaaaagcgu

SEQ ID NO: 4694 - RNA, 21 nt, Artificial Sequence
  LDLR targeting guide sequence portion
caucauuuggugaaugaguuu

SEQ ID NO: 4695 - RNA, 21 nt, Artificial Sequence
  LDLR targeting guide sequence portion
cauccaccaaucucuaagcca

SEQ ID NO: 4696 - RNA, 21 nt, Artificial Sequence
  LDLR targeting guide sequence portion
caucccaacacacacgacaga

SEQ ID NO: 4697 - RNA, 21 nt, Artificial Sequence
  LDLR targeting guide sequence portion
cauccccuccccuuucaucuu

SEQ ID NO: 4698 - RNA, 21 nt, Artificial Sequence
  LDLR targeting guide sequence portion
cauccucccaccucagccucg

SEQ ID NO: 4699 - RNA, 21 nt, Artificial Sequence
  LDLR targeting guide sequence portion
cauccucccgaccccuaccca

SEQ ID NO: 4700 - RNA, 21 nt, Artificial Sequence
  LDLR targeting guide sequence portion
cauccugguccccccgggccu

SEQ ID NO: 4701 - RNA, 21 nt, Artificial Sequence
  LDLR targeting guide sequence portion
caucucccagaagccacucau

SEQ ID NO: 4702 - RNA, 21 nt, Artificial Sequence
  LDLR targeting guide sequence portion
caucucuuaaaaaaugaauuu

SEQ ID NO: 4703 - RNA, 21 nt, Artificial Sequence
  LDLR targeting guide sequence portion
caucugccuggagucccgucc

SEQ ID NO: 4704 - RNA, 21 nt, Artificial Sequence
  LDLR targeting guide sequence portion
caucugcuguuguguguugaa

SEQ ID NO: 4705 - RNA, 21 nt, Artificial Sequence
  LDLR targeting guide sequence portion
caucugggaggcagaacaggc

SEQ ID NO: 4706 - RNA, 21 nt, Artificial Sequence
  LDLR targeting guide sequence portion
caucuucacgcgggagucuga

SEQ ID NO: 4707 - RNA, 21 nt, Artificial Sequence
  LDLR targeting guide sequence portion
caucuuccauguuugaggauu

SEQ ID NO: 4708 - RNA, 21 nt, Artificial Sequence
  LDLR targeting guide sequence portion
caugaaucccuuuccuggcuu

SEQ ID NO: 4709 - RNA, 21 nt, Artificial Sequence
  LDLR targeting guide sequence portion
caugacccacccagugucuuu

SEQ ID NO: 4710 - RNA, 21 nt, Artificial Sequence
  LDLR targeting guide sequence portion
caugauucgggggugacaggg

SEQ ID NO: 4711 - RNA, 21 nt, Artificial Sequence
  LDLR targeting guide sequence portion
caugcaauggcuuggguuggg

SEQ ID NO: 4712 - RNA, 21 nt, Artificial Sequence
  LDLR targeting guide sequence portion
caugcacggugaggccgggcg

SEQ ID NO: 4713 - RNA, 21 nt, Artificial Sequence
  LDLR targeting guide sequence portion
caugcauggugcaucagcagc

SEQ ID NO: 4714 - RNA, 21 nt, Artificial Sequence
  LDLR targeting guide sequence portion
caugccuggccagaggccaug

SEQ ID NO: 4715 - RNA, 21 nt, Artificial Sequence
  LDLR targeting guide sequence portion
cauggaagaugaaaggggagg

SEQ ID NO: 4716 - RNA, 21 nt, Artificial Sequence
  LDLR targeting guide sequence portion
cauggccucuggccaggcaug

SEQ ID NO: 4717 - RNA, 21 nt, Artificial Sequence
  LDLR targeting guide sequence portion
cauggcgaggcugagguggga

SEQ ID NO: 4718 - RNA, 21 nt, Artificial Sequence
  LDLR targeting guide sequence portion
cauggcgucggaaaugaucug

SEQ ID NO: 4719 - RNA, 21 nt, Artificial Sequence
  LDLR targeting guide sequence portion
caugggcacuguccgaagccu

SEQ ID NO: 4720 - RNA, 21 nt, Artificial Sequence
  LDLR targeting guide sequence portion
caugggcugcugaugcaccau

SEQ ID NO: 4721 - RNA, 21 nt, Artificial Sequence
  LDLR targeting guide sequence portion
cauggugcaucagcagcccau

SEQ ID NO: 4722 - RNA, 21 nt, Artificial Sequence
  LDLR targeting guide sequence portion
cauguuugaggauugugucac

SEQ ID NO: 4723 - RNA, 21 nt, Artificial Sequence
  LDLR targeting guide sequence portion
cauguuuuaaacacauaccca

SEQ ID NO: 4724 - RNA, 21 nt, Artificial Sequence
  LDLR targeting guide sequence portion
cauucaccaaaugaugccacu

SEQ ID NO: 4725 - RNA, 21 nt, Artificial Sequence
  LDLR targeting guide sequence portion
cauucacuuccccaaucuugu

SEQ ID NO: 4726 - RNA, 21 nt, Artificial Sequence
  LDLR targeting guide sequence portion
cauucaggcuacaaaaaccuu

SEQ ID NO: 4727 - RNA, 21 nt, Artificial Sequence
  LDLR targeting guide sequence portion
cauucauugacacgggcuuuc

SEQ ID NO: 4728 - RNA, 21 nt, Artificial Sequence
  LDLR targeting guide sequence portion
cauucccguggucuccuugca

SEQ ID NO: 4729 - RNA, 21 nt, Artificial Sequence
  LDLR targeting guide sequence portion
cauucucccaaaaagcguugc

SEQ ID NO: 4730 - RNA, 21 nt, Artificial Sequence
  LDLR targeting guide sequence portion
cauugacacgggcuuucccug

SEQ ID NO: 4731 - RNA, 21 nt, Artificial Sequence
  LDLR targeting guide sequence portion
cauugcaugggcacuguccga

SEQ ID NO: 4732 - RNA, 21 nt, Artificial Sequence
  LDLR targeting guide sequence portion
cauugccugccagagcuuugu

SEQ ID NO: 4733 - RNA, 21 nt, Artificial Sequence
  LDLR targeting guide sequence portion
cauugucgucuuuauguccgc

SEQ ID NO: 4734 - RNA, 21 nt, Artificial Sequence
  LDLR targeting guide sequence portion
cauuuacgugcuccgaaacca

SEQ ID NO: 4735 - RNA, 21 nt, Artificial Sequence
  LDLR targeting guide sequence portion
cauuucagaggcaauaacccc

SEQ ID NO: 4736 - RNA, 21 nt, Artificial Sequence
  LDLR targeting guide sequence portion
cauuuccgacgccaugaaucc

SEQ ID NO: 4737 - RNA, 21 nt, Artificial Sequence
  LDLR targeting guide sequence portion
cauuucucuccaggaaguuuu

SEQ ID NO: 4738 - RNA, 21 nt, Artificial Sequence
  LDLR targeting guide sequence portion
cauuugaggcugucgugagcu

SEQ ID NO: 4739 - RNA, 21 nt, Artificial Sequence
  LDLR targeting guide sequence portion
cauuugcauagaaguggaagc

SEQ ID NO: 4740 - RNA, 21 nt, Artificial Sequence
  LDLR targeting guide sequence portion
cauuuggugaaugaguuuggu

SEQ ID NO: 4741 - RNA, 21 nt, Artificial Sequence
  LDLR targeting guide sequence portion
cauuuuuuaagagaugggguc

SEQ ID NO: 4742 - RNA, 21 nt, Artificial Sequence
  LDLR targeting guide sequence portion
ccaaaaagcguugcacacagu

SEQ ID NO: 4743 - RNA, 21 nt, Artificial Sequence
  LDLR targeting guide sequence portion
ccaaaaaguuaaaaaucagcu

SEQ ID NO: 4744 - RNA, 21 nt, Artificial Sequence
  LDLR targeting guide sequence portion
ccaaaaucccaacccaagcca

SEQ ID NO: 4745 - RNA, 21 nt, Artificial Sequence
  LDLR targeting guide sequence portion
ccaaaccccuaaacucaggag

SEQ ID NO: 4746 - RNA, 21 nt, Artificial Sequence
  LDLR targeting guide sequence portion
ccaaacucauucaccaaauga

SEQ ID NO: 4747 - RNA, 21 nt, Artificial Sequence
  LDLR targeting guide sequence portion
ccaaagcauugccugccagag

SEQ ID NO: 4748 - RNA, 21 nt, Artificial Sequence
  LDLR targeting guide sequence portion
ccaaaugaugccacuucccag

SEQ ID NO: 4749 - RNA, 21 nt, Artificial Sequence
  LDLR targeting guide sequence portion
ccaaauguacacaguguacaa

SEQ ID NO: 4750 - RNA, 21 nt, Artificial Sequence
  LDLR targeting guide sequence portion
ccaaauucauuuuuuaagaga

SEQ ID NO: 4751 - RNA, 21 nt, Artificial Sequence
  LDLR targeting guide sequence portion
ccaacacacacgacagaaaac

SEQ ID NO: 4752 - RNA, 21 nt, Artificial Sequence
  LDLR targeting guide sequence portion
ccaacccaagccauugcaugg

SEQ ID NO: 4753 - RNA, 21 nt, Artificial Sequence
  LDLR targeting guide sequence portion
ccaacgggacccccuggcccu

SEQ ID NO: 4754 - RNA, 21 nt, Artificial Sequence
  LDLR targeting guide sequence portion
ccaacuccugaacucaaguga

SEQ ID NO: 4755 - RNA, 21 nt, Artificial Sequence
  LDLR targeting guide sequence portion
ccaagccauucacuuccccaa

SEQ ID NO: 4756 - RNA, 21 nt, Artificial Sequence
  LDLR targeting guide sequence portion
ccaagccauugcaugggcacu

SEQ ID NO: 4757 - RNA, 21 nt, Artificial Sequence
  LDLR targeting guide sequence portion
ccaagguaaccgggugucuca

SEQ ID NO: 4758 - RNA, 21 nt, Artificial Sequence
  LDLR targeting guide sequence portion
ccaaucccuugugacaucuuc

SEQ ID NO: 4759 - RNA, 21 nt, Artificial Sequence
  LDLR targeting guide sequence portion
ccaaucucuaagccaaacccc

SEQ ID NO: 4760 - RNA, 21 nt, Artificial Sequence
  LDLR targeting guide sequence portion
ccaaucuugucguugaugggu

SEQ ID NO: 4761 - RNA, 21 nt, Artificial Sequence
  LDLR targeting guide sequence portion
ccacaccugggugcaggccac

SEQ ID NO: 4762 - RNA, 21 nt, Artificial Sequence
  LDLR targeting guide sequence portion
ccaccaaucucuaagccaaac

SEQ ID NO: 4763 - RNA, 21 nt, Artificial Sequence
  LDLR targeting guide sequence portion
ccaccacggauucagccagau

SEQ ID NO: 4764 - RNA, 21 nt, Artificial Sequence
  LDLR targeting guide sequence portion
ccacccagugucuuucgaggu

SEQ ID NO: 4765 - RNA, 21 nt, Artificial Sequence
  LDLR targeting guide sequence portion
ccaccguacccagcugauuuu

SEQ ID NO: 4766 - RNA, 21 nt, Artificial Sequence
  LDLR targeting guide sequence portion
ccaccgugacacaauccucaa

SEQ ID NO: 4767 - RNA, 21 nt, Artificial Sequence
  LDLR targeting guide sequence portion
ccaccuagugcuuccacuucu

SEQ ID NO: 4768 - RNA, 21 nt, Artificial Sequence
  LDLR targeting guide sequence portion
ccaccucagccucgccaugcc

SEQ ID NO: 4769 - RNA, 21 nt, Artificial Sequence
  LDLR targeting guide sequence portion
ccaccucgaaagacacugggu

SEQ ID NO: 4770 - RNA, 21 nt, Artificial Sequence
  LDLR targeting guide sequence portion
ccacggauucagccagaucau

SEQ ID NO: 4771 - RNA, 21 nt, Artificial Sequence
  LDLR targeting guide sequence portion
ccacgggaauggaagugggua

SEQ ID NO: 4772 - RNA, 21 nt, Artificial Sequence
  LDLR targeting guide sequence portion
ccacgucauccuccagacuga

SEQ ID NO: 4773 - RNA, 21 nt, Artificial Sequence
  LDLR targeting guide sequence portion
ccacguguccucacggccaag

SEQ ID NO: 4774 - RNA, 21 nt, Artificial Sequence
  LDLR targeting guide sequence portion
ccacuaucuguacagggacgc

SEQ ID NO: 4775 - RNA, 21 nt, Artificial Sequence
  LDLR targeting guide sequence portion
ccacucauacauacaacgggg

SEQ ID NO: 4776 - RNA, 21 nt, Artificial Sequence
  LDLR targeting guide sequence portion
ccacugcgcccggccucaccg

SEQ ID NO: 4777 - RNA, 21 nt, Artificial Sequence
  LDLR targeting guide sequence portion
ccacuguauagaagguuuuug

SEQ ID NO: 4778 - RNA, 21 nt, Artificial Sequence
  LDLR targeting guide sequence portion
ccacuuccauucccguggucu

SEQ ID NO: 4779 - RNA, 21 nt, Artificial Sequence
  LDLR targeting guide sequence portion
ccacuucccagaggcagagcc

SEQ ID NO: 4780 - RNA, 21 nt, Artificial Sequence
  LDLR targeting guide sequence portion
ccacuucuaugcaaaugccuc

SEQ ID NO: 4781 - RNA, 21 nt, Artificial Sequence
  LDLR targeting guide sequence portion
ccacuugcuucucugggccug

SEQ ID NO: 4782 - RNA, 21 nt, Artificial Sequence
  LDLR targeting guide sequence portion
ccagaaaggcuuaucacgguu

SEQ ID NO: 4783 - RNA, 21 nt, Artificial Sequence
  LDLR targeting guide sequence portion
ccagaacccuuccugagaccu

SEQ ID NO: 4784 - RNA, 21 nt, Artificial Sequence
  LDLR targeting guide sequence portion
ccagaagccacucauacauac

SEQ ID NO: 4785 - RNA, 21 nt, Artificial Sequence
  LDLR targeting guide sequence portion
ccagacacaggugccucacgc

SEQ ID NO: 4786 - RNA, 21 nt, Artificial Sequence
  LDLR targeting guide sequence portion
ccagagaagcaaguggcuuuc

SEQ ID NO: 4787 - RNA, 21 nt, Artificial Sequence
  LDLR targeting guide sequence portion
ccagaggcagagccugaguca

SEQ ID NO: 4788 - RNA, 21 nt, Artificial Sequence
  LDLR targeting guide sequence portion
ccagaggccaugggcugcuga

SEQ ID NO: 4789 - RNA, 21 nt, Artificial Sequence
  LDLR targeting guide sequence portion
ccagaucauuuccgacgccau

SEQ ID NO: 4790 - RNA, 21 nt, Artificial Sequence
  LDLR targeting guide sequence portion
ccagccuggugcccauccucc

SEQ ID NO: 4791 - RNA, 21 nt, Artificial Sequence
  LDLR targeting guide sequence portion
ccaggaaagggauucauggcg

SEQ ID NO: 4792 - RNA, 21 nt, Artificial Sequence
  LDLR targeting guide sequence portion
ccaggaaguuuugaguuucuc

SEQ ID NO: 4793 - RNA, 21 nt, Artificial Sequence
  LDLR targeting guide sequence portion
ccaggaugacaccuccauuuc

SEQ ID NO: 4794 - RNA, 21 nt, Artificial Sequence
  LDLR targeting guide sequence portion
ccaggcagauguucacgccac

SEQ ID NO: 4795 - RNA, 21 nt, Artificial Sequence
  LDLR targeting guide sequence portion
ccaggcauggcgaggcugagg

SEQ ID NO: 4796 - RNA, 21 nt, Artificial Sequence
  LDLR targeting guide sequence portion
ccaggccagggaaagcccgug

SEQ ID NO: 4797 - RNA, 21 nt, Artificial Sequence
  LDLR targeting guide sequence portion
ccaggccugagcaacaaagcg

SEQ ID NO: 4798 - RNA, 21 nt, Artificial Sequence
  LDLR targeting guide sequence portion
ccaggcuggaaagcaguggca

SEQ ID NO: 4799 - RNA, 21 nt, Artificial Sequence
  LDLR targeting guide sequence portion
ccaggcugguguccugacagc

SEQ ID NO: 4800 - RNA, 21 nt, Artificial Sequence
  LDLR targeting guide sequence portion
ccagggaaagcccgugucaau

SEQ ID NO: 4801 - RNA, 21 nt, Artificial Sequence
  LDLR targeting guide sequence portion
ccagggggucccguuggugcc

SEQ ID NO: 4802 - RNA, 21 nt, Artificial Sequence
  LDLR targeting guide sequence portion
ccagguguggcugucaggaca

SEQ ID NO: 4803 - RNA, 21 nt, Artificial Sequence
  LDLR targeting guide sequence portion
ccagguuagccuuugcccugu

SEQ ID NO: 4804 - RNA, 21 nt, Artificial Sequence
  LDLR targeting guide sequence portion
ccagucuggaucguuugacgg

SEQ ID NO: 4805 - RNA, 21 nt, Artificial Sequence
  LDLR targeting guide sequence portion
ccagugacucaggcucugccu

SEQ ID NO: 4806 - RNA, 21 nt, Artificial Sequence
  LDLR targeting guide sequence portion
ccagugcagggaaccgugaua

SEQ ID NO: 4807 - RNA, 21 nt, Artificial Sequence
  LDLR targeting guide sequence portion
ccagugucuuucgaggugggu

SEQ ID NO: 4808 - RNA, 21 nt, Artificial Sequence
  LDLR targeting guide sequence portion
ccaguucgugcaaauaaucuu

SEQ ID NO: 4809 - RNA, 21 nt, Artificial Sequence
  LDLR targeting guide sequence portion
ccaucaacgacaagauugggg

SEQ ID NO: 4810 - RNA, 21 nt, Artificial Sequence
  LDLR targeting guide sequence portion
ccaucccaacacacacgacag

SEQ ID NO: 4811 - RNA, 21 nt, Artificial Sequence
  LDLR targeting guide sequence portion
ccauccucccaccucagccuc

SEQ ID NO: 4812 - RNA, 21 nt, Artificial Sequence
  LDLR targeting guide sequence portion
ccauccucccgaccccuaccc

SEQ ID NO: 4813 - RNA, 21 nt, Artificial Sequence
  LDLR targeting guide sequence portion
ccaucucccagaagccacuca

SEQ ID NO: 4814 - RNA, 21 nt, Artificial Sequence
  LDLR targeting guide sequence portion
ccaucucuuaaaaaaugaauu

SEQ ID NO: 4815 - RNA, 21 nt, Artificial Sequence
  LDLR targeting guide sequence portion
ccaucugcuguuguguguuga

SEQ ID NO: 4816 - RNA, 21 nt, Artificial Sequence
  LDLR targeting guide sequence portion
ccaugaaucccuuuccuggcu

SEQ ID NO: 4817 - RNA, 21 nt, Artificial Sequence
  LDLR targeting guide sequence portion
ccaugcaauggcuuggguugg

SEQ ID NO: 4818 - RNA, 21 nt, Artificial Sequence
  LDLR targeting guide sequence portion
ccaugcauggugcaucagcag

SEQ ID NO: 4819 - RNA, 21 nt, Artificial Sequence
  LDLR targeting guide sequence portion
ccaugccuggccagaggccau

SEQ ID NO: 4820 - RNA, 21 nt, Artificial Sequence
  LDLR targeting guide sequence portion
ccauggccucuggccaggcau

SEQ ID NO: 4821 - RNA, 21 nt, Artificial Sequence
  LDLR targeting guide sequence portion
ccaugggcugcugaugcacca

SEQ ID NO: 4822 - RNA, 21 nt, Artificial Sequence
  LDLR targeting guide sequence portion
ccauguuugaggauuguguca

SEQ ID NO: 4823 - RNA, 21 nt, Artificial Sequence
  LDLR targeting guide sequence portion
ccauucacuuccccaaucuug

SEQ ID NO: 4824 - RNA, 21 nt, Artificial Sequence
  LDLR targeting guide sequence portion
ccauucccguggucuccuugc

SEQ ID NO: 4825 - RNA, 21 nt, Artificial Sequence
  LDLR targeting guide sequence portion
ccauugcaugggcacuguccg

SEQ ID NO: 4826 - RNA, 21 nt, Artificial Sequence
  LDLR targeting guide sequence portion
ccauugucgucuuuauguccg

SEQ ID NO: 4827 - RNA, 21 nt, Artificial Sequence
  LDLR targeting guide sequence portion
ccauuucucuccaggaaguuu

SEQ ID NO: 4828 - RNA, 21 nt, Artificial Sequence
  LDLR targeting guide sequence portion
cccaaaaagcguugcacacag

SEQ ID NO: 4829 - RNA, 21 nt, Artificial Sequence
  LDLR targeting guide sequence portion
cccaacacacacgacagaaaa

SEQ ID NO: 4830 - RNA, 21 nt, Artificial Sequence
  LDLR targeting guide sequence portion
cccaacccaagccauugcaug

SEQ ID NO: 4831 - RNA, 21 nt, Artificial Sequence
  LDLR targeting guide sequence portion
cccaagccauugcaugggcac

SEQ ID NO: 4832 - RNA, 21 nt, Artificial Sequence
  LDLR targeting guide sequence portion
cccaaucuugucguugauggg

SEQ ID NO: 4833 - RNA, 21 nt, Artificial Sequence
  LDLR targeting guide sequence portion
cccacccagugucuuucgagg

SEQ ID NO: 4834 - RNA, 21 nt, Artificial Sequence
  LDLR targeting guide sequence portion
cccaccuagugcuuccacuuc

SEQ ID NO: 4835 - RNA, 21 nt, Artificial Sequence
  LDLR targeting guide sequence portion
cccaccucagccucgccaugc

SEQ ID NO: 4836 - RNA, 21 nt, Artificial Sequence
  LDLR targeting guide sequence portion
cccaccucgaaagacacuggg

SEQ ID NO: 4837 - RNA, 21 nt, Artificial Sequence
  LDLR targeting guide sequence portion
cccacuaucuguacagggacg

SEQ ID NO: 4838 - RNA, 21 nt, Artificial Sequence
  LDLR targeting guide sequence portion
cccacuuccauucccgugguc

SEQ ID NO: 4839 - RNA, 21 nt, Artificial Sequence
  LDLR targeting guide sequence portion
cccagaacccuuccugagacc

SEQ ID NO: 4840 - RNA, 21 nt, Artificial Sequence
  LDLR targeting guide sequence portion
cccagaagccacucauacaua

SEQ ID NO: 4841 - RNA, 21 nt, Artificial Sequence
  LDLR targeting guide sequence portion
cccagagaagcaaguggcuuu

SEQ ID NO: 4842 - RNA, 21 nt, Artificial Sequence
  LDLR targeting guide sequence portion
cccagaggcagagccugaguc

SEQ ID NO: 4843 - RNA, 21 nt, Artificial Sequence
  LDLR targeting guide sequence portion
cccagcugauuuuuaacuuuu

SEQ ID NO: 4844 - RNA, 21 nt, Artificial Sequence
  LDLR targeting guide sequence portion
cccaggccagggaaagcccgu

SEQ ID NO: 4845 - RNA, 21 nt, Artificial Sequence
  LDLR targeting guide sequence portion
cccaggcuggaaagcaguggc

SEQ ID NO: 4846 - RNA, 21 nt, Artificial Sequence
  LDLR targeting guide sequence portion
cccagggacaaaacacugugu

SEQ ID NO: 4847 - RNA, 21 nt, Artificial Sequence
  LDLR targeting guide sequence portion
cccagguguggcugucaggac

SEQ ID NO: 4848 - RNA, 21 nt, Artificial Sequence
  LDLR targeting guide sequence portion
cccagugcagggaaccgugau

SEQ ID NO: 4849 - RNA, 21 nt, Artificial Sequence
  LDLR targeting guide sequence portion
cccagugucuuucgagguggg

SEQ ID NO: 4850 - RNA, 21 nt, Artificial Sequence
  LDLR targeting guide sequence portion
cccaucaacgacaagauuggg

SEQ ID NO: 4851 - RNA, 21 nt, Artificial Sequence
  LDLR targeting guide sequence portion
cccaucccaacacacacgaca

SEQ ID NO: 4852 - RNA, 21 nt, Artificial Sequence
  LDLR targeting guide sequence portion
cccauccucccgaccccuacc

SEQ ID NO: 4853 - RNA, 21 nt, Artificial Sequence
  LDLR targeting guide sequence portion
cccaucucccagaagccacuc

SEQ ID NO: 4854 - RNA, 21 nt, Artificial Sequence
  LDLR targeting guide sequence portion
cccaucucuacaaaaaccaaa

SEQ ID NO: 4855 - RNA, 21 nt, Artificial Sequence
  LDLR targeting guide sequence portion
cccaucucuuaaaaaaugaau

SEQ ID NO: 4856 - RNA, 21 nt, Artificial Sequence
  LDLR targeting guide sequence portion
cccaugcaauggcuuggguug

SEQ ID NO: 4857 - RNA, 21 nt, Artificial Sequence
  LDLR targeting guide sequence portion
cccauggccucuggccaggca

SEQ ID NO: 4858 - RNA, 21 nt, Artificial Sequence
  LDLR targeting guide sequence portion
ccccaaucuugucguugaugg

SEQ ID NO: 4859 - RNA, 21 nt, Artificial Sequence
  LDLR targeting guide sequence portion
ccccacuaucuguacagggac

SEQ ID NO: 4860 - RNA, 21 nt, Artificial Sequence
  LDLR targeting guide sequence portion
ccccagggacaaaacacugug

SEQ ID NO: 4861 - RNA, 21 nt, Artificial Sequence
  LDLR targeting guide sequence portion
ccccagugcagggaaccguga

SEQ ID NO: 4862 - RNA, 21 nt, Artificial Sequence
  LDLR targeting guide sequence portion
ccccaucucuuaaaaaaugaa

SEQ ID NO: 4863 - RNA, 21 nt, Artificial Sequence
  LDLR targeting guide sequence portion
cccccagugcagggaaccgug

SEQ ID NO: 4864 - RNA, 21 nt, Artificial Sequence
  LDLR targeting guide sequence portion
ccccccagugcagggaaccgu

SEQ ID NO: 4865 - RNA, 21 nt, Artificial Sequence
  LDLR targeting guide sequence portion
ccccccgggccuguuucucuu

SEQ ID NO: 4866 - RNA, 21 nt, Artificial Sequence
  LDLR targeting guide sequence portion
cccccgaaucaugacccaccc

SEQ ID NO: 4867 - RNA, 21 nt, Artificial Sequence
  LDLR targeting guide sequence portion
cccccgggccuguuucucuua

SEQ ID NO: 4868 - RNA, 21 nt, Artificial Sequence
  LDLR targeting guide sequence portion
cccccuacacagggccccgag

SEQ ID NO: 4869 - RNA, 21 nt, Artificial Sequence
  LDLR targeting guide sequence portion
cccccuggcccugccucaucc

SEQ ID NO: 4870 - RNA, 21 nt, Artificial Sequence
  LDLR targeting guide sequence portion
ccccgaaucaugacccaccca

SEQ ID NO: 4871 - RNA, 21 nt, Artificial Sequence
  LDLR targeting guide sequence portion
ccccgagaauagucacugaac

SEQ ID NO: 4872 - RNA, 21 nt, Artificial Sequence
  LDLR targeting guide sequence portion
ccccggcauucauugacacgg

SEQ ID NO: 4873 - RNA, 21 nt, Artificial Sequence
  LDLR targeting guide sequence portion
ccccgggccuguuucucuuau

SEQ ID NO: 4874 - RNA, 21 nt, Artificial Sequence
  LDLR targeting guide sequence portion
ccccguuguauguaugagugg

SEQ ID NO: 4875 - RNA, 21 nt, Artificial Sequence
  LDLR targeting guide sequence portion
ccccuaaacucaggagucaac

SEQ ID NO: 4876 - RNA, 21 nt, Artificial Sequence
  LDLR targeting guide sequence portion
ccccuacacagggccccgaga

SEQ ID NO: 4877 - RNA, 21 nt, Artificial Sequence
  LDLR targeting guide sequence portion
ccccuacccacuuccauuccc

SEQ ID NO: 4878 - RNA, 21 nt, Artificial Sequence
  LDLR targeting guide sequence portion
ccccuccccuuucaucuucca

SEQ ID NO: 4879 - RNA, 21 nt, Artificial Sequence
  LDLR targeting guide sequence portion
ccccucucuguccccggcauu

SEQ ID NO: 4880 - RNA, 21 nt, Artificial Sequence
  LDLR targeting guide sequence portion
ccccuuucaucuuccauguuu

SEQ ID NO: 4881 - RNA, 21 nt, Artificial Sequence
  LDLR targeting guide sequence portion
cccgaaucaugacccacccag

SEQ ID NO: 4882 - RNA, 21 nt, Artificial Sequence
  LDLR targeting guide sequence portion
cccgaccccuacccacuucca

SEQ ID NO: 4883 - RNA, 21 nt, Artificial Sequence
  LDLR targeting guide sequence portion
cccgagaauagucacugaaca

SEQ ID NO: 4884 - RNA, 21 nt, Artificial Sequence
  LDLR targeting guide sequence portion
cccgcgugaagaugucacaag

SEQ ID NO: 4885 - RNA, 21 nt, Artificial Sequence
  LDLR targeting guide sequence portion
cccggcauucauugacacggg

SEQ ID NO: 4886 - RNA, 21 nt, Artificial Sequence
  LDLR targeting guide sequence portion
cccggccucaccgugcauguu

SEQ ID NO: 4887 - RNA, 21 nt, Artificial Sequence
  LDLR targeting guide sequence portion
cccgggccuguuucucuuauc

SEQ ID NO: 4888 - RNA, 21 nt, Artificial Sequence
  LDLR targeting guide sequence portion
cccggggggaccaggaugaca

SEQ ID NO: 4889 - RNA, 21 nt, Artificial Sequence
  LDLR targeting guide sequence portion
cccggucaaccugccccucuc

SEQ ID NO: 4890 - RNA, 21 nt, Artificial Sequence
  LDLR targeting guide sequence portion
cccgguuaccuuggccgugag

SEQ ID NO: 4891 - RNA, 21 nt, Artificial Sequence
  LDLR targeting guide sequence portion
cccgucaaacgauccagacug

SEQ ID NO: 4892 - RNA, 21 nt, Artificial Sequence
  LDLR targeting guide sequence portion
cccgucccugcccagaacccu

SEQ ID NO: 4893 - RNA, 21 nt, Artificial Sequence
  LDLR targeting guide sequence portion
cccguggucuccuugcacuuu

SEQ ID NO: 4894 - RNA, 21 nt, Artificial Sequence
  LDLR targeting guide sequence portion
cccgugucaaugaaugccggg

SEQ ID NO: 4895 - RNA, 21 nt, Artificial Sequence
  LDLR targeting guide sequence portion
cccguuggugccaucugcugu

SEQ ID NO: 4896 - RNA, 21 nt, Artificial Sequence
  LDLR targeting guide sequence portion
cccguuguauguaugaguggc

SEQ ID NO: 4897 - RNA, 21 nt, Artificial Sequence
  LDLR targeting guide sequence portion
cccuaaacucaggagucaacg

SEQ ID NO: 4898 - RNA, 21 nt, Artificial Sequence
  LDLR targeting guide sequence portion
cccuacacagggccccgagaa

SEQ ID NO: 4899 - RNA, 21 nt, Artificial Sequence
  LDLR targeting guide sequence portion
cccuacccacuuccauucccg

SEQ ID NO: 4900 - RNA, 21 nt, Artificial Sequence
  LDLR targeting guide sequence portion
cccuccccuuucaucuuccau

SEQ ID NO: 4901 - RNA, 21 nt, Artificial Sequence
  LDLR targeting guide sequence portion
cccucucuguccccggcauuc

SEQ ID NO: 4902 - RNA, 21 nt, Artificial Sequence
  LDLR targeting guide sequence portion
cccugcccagaacccuuccug

SEQ ID NO: 4903 - RNA, 21 nt, Artificial Sequence
  LDLR targeting guide sequence portion
cccugccucauccaccaaucu

SEQ ID NO: 4904 - RNA, 21 nt, Artificial Sequence
  LDLR targeting guide sequence portion
cccuggcccugccucauccac

SEQ ID NO: 4905 - RNA, 21 nt, Artificial Sequence
  LDLR targeting guide sequence portion
cccuggccugggaucccaucc

SEQ ID NO: 4906 - RNA, 21 nt, Artificial Sequence
  LDLR targeting guide sequence portion
cccuggggacaauugccaauc

SEQ ID NO: 4907 - RNA, 21 nt, Artificial Sequence
  LDLR targeting guide sequence portion
cccugguugcuguauuuguuc

SEQ ID NO: 4908 - RNA, 21 nt, Artificial Sequence
  LDLR targeting guide sequence portion
cccuguacagauaguggggau

SEQ ID NO: 4909 - RNA, 21 nt, Artificial Sequence
  LDLR targeting guide sequence portion
cccugucacccccgaaucaug

SEQ ID NO: 4910 - RNA, 21 nt, Artificial Sequence
  LDLR targeting guide sequence portion
cccuguguaggggguuauugc

SEQ ID NO: 4911 - RNA, 21 nt, Artificial Sequence
  LDLR targeting guide sequence portion
cccuuaauauuuauuaagugc

SEQ ID NO: 4912 - RNA, 21 nt, Artificial Sequence
  LDLR targeting guide sequence portion
cccuuccugagaccucgccgg

SEQ ID NO: 4913 - RNA, 21 nt, Artificial Sequence
  LDLR targeting guide sequence portion
cccuugugacaucuucacgcg

SEQ ID NO: 4914 - RNA, 21 nt, Artificial Sequence
  LDLR targeting guide sequence portion
cccuuucaucuuccauguuug

SEQ ID NO: 4915 - RNA, 21 nt, Artificial Sequence
  LDLR targeting guide sequence portion
cccuuuccuggcuuaaggaag

SEQ ID NO: 4916 - RNA, 21 nt, Artificial Sequence
  LDLR targeting guide sequence portion
ccgaaaccagaaaggcuuauc

SEQ ID NO: 4917 - RNA, 21 nt, Artificial Sequence
  LDLR targeting guide sequence portion
ccgaagccuguucugccuccc

SEQ ID NO: 4918 - RNA, 21 nt, Artificial Sequence
  LDLR targeting guide sequence portion
ccgaaucaugacccacccagu

SEQ ID NO: 4919 - RNA, 21 nt, Artificial Sequence
  LDLR targeting guide sequence portion
ccgaccccuacccacuuccau

SEQ ID NO: 4920 - RNA, 21 nt, Artificial Sequence
  LDLR targeting guide sequence portion
ccgacgccaugaaucccuuuc

SEQ ID NO: 4921 - RNA, 21 nt, Artificial Sequence
  LDLR targeting guide sequence portion
ccgagaauagucacugaacaa

SEQ ID NO: 4922 - RNA, 21 nt, Artificial Sequence
  LDLR targeting guide sequence portion
ccgagaccaaacucauucacc

SEQ ID NO: 4923 - RNA, 21 nt, Artificial Sequence
  LDLR targeting guide sequence portion
ccgcccaccuagugcuuccac

SEQ ID NO: 4924 - RNA, 21 nt, Artificial Sequence
  LDLR targeting guide sequence portion
ccgcgugaagaugucacaagg

SEQ ID NO: 4925 - RNA, 21 nt, Artificial Sequence
  LDLR targeting guide sequence portion
ccggacaucagugcaacagua

SEQ ID NO: 4926 - RNA, 21 nt, Artificial Sequence
  LDLR targeting guide sequence portion
ccggagagacagugacagccu

SEQ ID NO: 4927 - RNA, 21 nt, Artificial Sequence
  LDLR targeting guide sequence portion
ccggcauucauugacacgggc

SEQ ID NO: 4928 - RNA, 21 nt, Artificial Sequence
  LDLR targeting guide sequence portion
ccggccucaccgugcauguuu

SEQ ID NO: 4929 - RNA, 21 nt, Artificial Sequence
  LDLR targeting guide sequence portion
ccggccuuguuuuauucaaag

SEQ ID NO: 4930 - RNA, 21 nt, Artificial Sequence
  LDLR targeting guide sequence portion
ccggcgaggucucaggaaggg

SEQ ID NO: 4931 - RNA, 21 nt, Artificial Sequence
  LDLR targeting guide sequence portion
ccgggacuucaaagccgugau

SEQ ID NO: 4932 - RNA, 21 nt, Artificial Sequence
  LDLR targeting guide sequence portion
ccgggccuguuucucuuaucc

SEQ ID NO: 4933 - RNA, 21 nt, Artificial Sequence
  LDLR targeting guide sequence portion
ccggggacagagaggggcagg

SEQ ID NO: 4934 - RNA, 21 nt, Artificial Sequence
  LDLR targeting guide sequence portion
ccggggggaccaggaugacac

SEQ ID NO: 4935 - RNA, 21 nt, Artificial Sequence
  LDLR targeting guide sequence portion
ccgggugucucaggcacuuaa

SEQ ID NO: 4936 - RNA, 21 nt, Artificial Sequence
  LDLR targeting guide sequence portion
ccggucaaccugccccucucu

SEQ ID NO: 4937 - RNA, 21 nt, Artificial Sequence
  LDLR targeting guide sequence portion
ccgguuaccuuggccgugagg

SEQ ID NO: 4938 - RNA, 21 nt, Artificial Sequence
  LDLR targeting guide sequence portion
ccguacccagcugauuuuuaa

SEQ ID NO: 4939 - RNA, 21 nt, Artificial Sequence
  LDLR targeting guide sequence portion
ccgucaaacgauccagacugg

SEQ ID NO: 4940 - RNA, 21 nt, Artificial Sequence
  LDLR targeting guide sequence portion
ccgucagacucccgcgugaag

SEQ ID NO: 4941 - RNA, 21 nt, Artificial Sequence
  LDLR targeting guide sequence portion
ccgucccugcccagaacccuu

SEQ ID NO: 4942 - RNA, 21 nt, Artificial Sequence
  LDLR targeting guide sequence portion
ccgugacacaauccucaaaca

SEQ ID NO: 4943 - RNA, 21 nt, Artificial Sequence
  LDLR targeting guide sequence portion
ccgugaggacacguggccugc

SEQ ID NO: 4944 - RNA, 21 nt, Artificial Sequence
  LDLR targeting guide sequence portion
ccgugauaagccuuucugguu

SEQ ID NO: 4945 - RNA, 21 nt, Artificial Sequence
  LDLR targeting guide sequence portion
ccgugaucgugaauaucgaga

SEQ ID NO: 4946 - RNA, 21 nt, Artificial Sequence
  LDLR targeting guide sequence portion
ccgugcauguuuuaaacacau

SEQ ID NO: 4947 - RNA, 21 nt, Artificial Sequence
  LDLR targeting guide sequence portion
ccguggucuccuugcacuuuc

SEQ ID NO: 4948 - RNA, 21 nt, Artificial Sequence
  LDLR targeting guide sequence portion
ccgugguggcaccgagaccaa

SEQ ID NO: 4949 - RNA, 21 nt, Artificial Sequence
  LDLR targeting guide sequence portion
ccgugucaaugaaugccgggg

SEQ ID NO: 4950 - RNA, 21 nt, Artificial Sequence
  LDLR targeting guide sequence portion
ccguguuacuguugcacugau

SEQ ID NO: 4951 - RNA, 21 nt, Artificial Sequence
  LDLR targeting guide sequence portion
ccguuggugccaucugcuguu

SEQ ID NO: 4952 - RNA, 21 nt, Artificial Sequence
  LDLR targeting guide sequence portion
ccguuguauguaugaguggcu

SEQ ID NO: 4953 - RNA, 21 nt, Artificial Sequence
  LDLR targeting guide sequence portion
ccuaaacucaggagucaacgu

SEQ ID NO: 4954 - RNA, 21 nt, Artificial Sequence
  LDLR targeting guide sequence portion
ccuacacagggccccgagaau

SEQ ID NO: 4955 - RNA, 21 nt, Artificial Sequence
  LDLR targeting guide sequence portion
ccuacccacuuccauucccgu

SEQ ID NO: 4956 - RNA, 21 nt, Artificial Sequence
  LDLR targeting guide sequence portion
ccuagugcuuccacuucuaug

SEQ ID NO: 4957 - RNA, 21 nt, Artificial Sequence
  LDLR targeting guide sequence portion
ccucaaacauggaagaugaaa

SEQ ID NO: 4958 - RNA, 21 nt, Artificial Sequence
  LDLR targeting guide sequence portion
ccucaaaugccugagcucaaa

SEQ ID NO: 4959 - RNA, 21 nt, Artificial Sequence
  LDLR targeting guide sequence portion
ccucaccgugcauguuuuaaa

SEQ ID NO: 4960 - RNA, 21 nt, Artificial Sequence
  LDLR targeting guide sequence portion
ccucacggccaagguaaccgg

SEQ ID NO: 4961 - RNA, 21 nt, Artificial Sequence
  LDLR targeting guide sequence portion
ccucagccucgccaugccugg

SEQ ID NO: 4962 - RNA, 21 nt, Artificial Sequence
  LDLR targeting guide sequence portion
ccucauccaccaaucucuaag

SEQ ID NO: 4963 - RNA, 21 nt, Artificial Sequence
  LDLR targeting guide sequence portion
ccuccaagccauucacuuccc

SEQ ID NO: 4964 - RNA, 21 nt, Artificial Sequence
  LDLR targeting guide sequence portion
ccuccagucuggaucguuuga

SEQ ID NO: 4965 - RNA, 21 nt, Artificial Sequence
  LDLR targeting guide sequence portion
ccuccauuucucuccaggaag

SEQ ID NO: 4966 - RNA, 21 nt, Artificial Sequence
  LDLR targeting guide sequence portion
ccucccaccucagccucgcca

SEQ ID NO: 4967 - RNA, 21 nt, Artificial Sequence
  LDLR targeting guide sequence portion
ccuccccuuucaucuuccaug

SEQ ID NO: 4968 - RNA, 21 nt, Artificial Sequence
  LDLR targeting guide sequence portion
ccucccgaccccuacccacuu

SEQ ID NO: 4969 - RNA, 21 nt, Artificial Sequence
  LDLR targeting guide sequence portion
ccuccgucagacucccgcgug

SEQ ID NO: 4970 - RNA, 21 nt, Artificial Sequence
  LDLR targeting guide sequence portion
ccucgaaagacacuggguggg

SEQ ID NO: 4971 - RNA, 21 nt, Artificial Sequence
  LDLR targeting guide sequence portion
ccucgccaugccuggccagag

SEQ ID NO: 4972 - RNA, 21 nt, Artificial Sequence
  LDLR targeting guide sequence portion
ccucgccggccuuguuuuauu

SEQ ID NO: 4973 - RNA, 21 nt, Artificial Sequence
  LDLR targeting guide sequence portion
ccucgugaaggauaagagaaa

SEQ ID NO: 4974 - RNA, 21 nt, Artificial Sequence
  LDLR targeting guide sequence portion
ccucucuguccccggcauuca

SEQ ID NO: 4975 - RNA, 21 nt, Artificial Sequence
  LDLR targeting guide sequence portion
ccucugaaaugccucuucuuu

SEQ ID NO: 4976 - RNA, 21 nt, Artificial Sequence
  LDLR targeting guide sequence portion
ccucuggccaggcauggcgag

SEQ ID NO: 4977 - RNA, 21 nt, Artificial Sequence
  LDLR targeting guide sequence portion
ccucugggaaguggcaucauu

SEQ ID NO: 4978 - RNA, 21 nt, Artificial Sequence
  LDLR targeting guide sequence portion
ccucuucuaugcaagccuugc

SEQ ID NO: 4979 - RNA, 21 nt, Artificial Sequence
  LDLR targeting guide sequence portion
ccugaagucccgucaaacgau

SEQ ID NO: 4980 - RNA, 21 nt, Artificial Sequence
  LDLR targeting guide sequence portion
ccugaaugucuuacugugauc

SEQ ID NO: 4981 - RNA, 21 nt, Artificial Sequence
  LDLR targeting guide sequence portion
ccugacagccacaccugggug

SEQ ID NO: 4982 - RNA, 21 nt, Artificial Sequence
  LDLR targeting guide sequence portion
ccugacauccccuccccuuuc

SEQ ID NO: 4983 - RNA, 21 nt, Artificial Sequence
  LDLR targeting guide sequence portion
ccugagacacccgguuaccuu

SEQ ID NO: 4984 - RNA, 21 nt, Artificial Sequence
  LDLR targeting guide sequence portion
ccugagaccucgccggccuug

SEQ ID NO: 4985 - RNA, 21 nt, Artificial Sequence
  LDLR targeting guide sequence portion
ccugagcaacaaagcgagauc

SEQ ID NO: 4986 - RNA, 21 nt, Artificial Sequence
  LDLR targeting guide sequence portion
ccugagucacuggucacccuu

SEQ ID NO: 4987 - RNA, 21 nt, Artificial Sequence
  LDLR targeting guide sequence portion
ccugaguuuagggguuuggcu

SEQ ID NO: 4988 - RNA, 21 nt, Artificial Sequence
  LDLR targeting guide sequence portion
ccugcacccagguguggcugu

SEQ ID NO: 4989 - RNA, 21 nt, Artificial Sequence
  LDLR targeting guide sequence portion
ccugccagagcuuuguuuuau

SEQ ID NO: 4990 - RNA, 21 nt, Artificial Sequence
  LDLR targeting guide sequence portion
ccugccccucucuguccccgg

SEQ ID NO: 4991 - RNA, 21 nt, Artificial Sequence
  LDLR targeting guide sequence portion
ccugccucauccaccaaucuc

SEQ ID NO: 4992 - RNA, 21 nt, Artificial Sequence
  LDLR targeting guide sequence portion
ccuggagagaaauggaggugu

SEQ ID NO: 4993 - RNA, 21 nt, Artificial Sequence
  LDLR targeting guide sequence portion
ccuggagucccgucccugccc

SEQ ID NO: 4994 - RNA, 21 nt, Artificial Sequence
  LDLR targeting guide sequence portion
ccuggccagaggccaugggcu

SEQ ID NO: 4995 - RNA, 21 nt, Artificial Sequence
  LDLR targeting guide sequence portion
ccuggcccugccucauccacc

SEQ ID NO: 4996 - RNA, 21 nt, Artificial Sequence
  LDLR targeting guide sequence portion
ccuggccugggaucccauccc

SEQ ID NO: 4997 - RNA, 21 nt, Artificial Sequence
  LDLR targeting guide sequence portion
ccuggcugucuagcaaggcuu

SEQ ID NO: 4998 - RNA, 21 nt, Artificial Sequence
  LDLR targeting guide sequence portion
ccuggcuuaaggaagguacaa

SEQ ID NO: 4999 - RNA, 21 nt, Artificial Sequence
  LDLR targeting guide sequence portion
ccugggaucccaucccaacac

SEQ ID NO: 5000 - RNA, 21 nt, Artificial Sequence
  LDLR targeting guide sequence portion
ccuggggacaauugccaaucc

SEQ ID NO: 5001 - RNA, 21 nt, Artificial Sequence
  LDLR targeting guide sequence portion
ccugggugcaggccacguguc

SEQ ID NO: 5002 - RNA, 21 nt, Artificial Sequence
  LDLR targeting guide sequence portion
ccugguccccccgggccuguu

SEQ ID NO: 5003 - RNA, 21 nt, Artificial Sequence
  LDLR targeting guide sequence portion
ccuggugcccauccucccgac

SEQ ID NO: 5004 - RNA, 21 nt, Artificial Sequence
  LDLR targeting guide sequence portion
ccugguugcuguauuuguuca

SEQ ID NO: 5005 - RNA, 21 nt, Artificial Sequence
  LDLR targeting guide sequence portion
ccuguacagauaguggggauu

SEQ ID NO: 5006 - RNA, 21 nt, Artificial Sequence
  LDLR targeting guide sequence portion
ccugucacccccgaaucauga

SEQ ID NO: 5007 - RNA, 21 nt, Artificial Sequence
  LDLR targeting guide sequence portion
ccuguguaggggguuauugcc

SEQ ID NO: 5008 - RNA, 21 nt, Artificial Sequence
  LDLR targeting guide sequence portion
ccugugucuggccaaauucau

SEQ ID NO: 5009 - RNA, 21 nt, Artificial Sequence
  LDLR targeting guide sequence portion
ccuguucugccucccagauga

SEQ ID NO: 5010 - RNA, 21 nt, Artificial Sequence
  LDLR targeting guide sequence portion
ccuguuucucuuauccuucac

SEQ ID NO: 5011 - RNA, 21 nt, Artificial Sequence
  LDLR targeting guide sequence portion
ccuuaagccaggaaagggauu

SEQ ID NO: 5012 - RNA, 21 nt, Artificial Sequence
  LDLR targeting guide sequence portion
ccuuaauauuuauuaagugcc

SEQ ID NO: 5013 - RNA, 21 nt, Artificial Sequence
  LDLR targeting guide sequence portion
ccuucacgaggaaaggaagaa

SEQ ID NO: 5014 - RNA, 21 nt, Artificial Sequence
  LDLR targeting guide sequence portion
ccuuccugagaccucgccggc

SEQ ID NO: 5015 - RNA, 21 nt, Artificial Sequence
  LDLR targeting guide sequence portion
ccuuccuuaagccaggaaagg

SEQ ID NO: 5016 - RNA, 21 nt, Artificial Sequence
  LDLR targeting guide sequence portion
ccuucuauacagugguuuaaa

SEQ ID NO: 5017 - RNA, 21 nt, Artificial Sequence
  LDLR targeting guide sequence portion
ccuugcacuuucucaguucag

SEQ ID NO: 5018 - RNA, 21 nt, Artificial Sequence
  LDLR targeting guide sequence portion
ccuugcuagacagccagguua

SEQ ID NO: 5019 - RNA, 21 nt, Artificial Sequence
  LDLR targeting guide sequence portion
ccuuggccgugaggacacgug

SEQ ID NO: 5020 - RNA, 21 nt, Artificial Sequence
  LDLR targeting guide sequence portion
ccuugugacaucuucacgcgg

SEQ ID NO: 5021 - RNA, 21 nt, Artificial Sequence
  LDLR targeting guide sequence portion
ccuuguuuuauucaaagacag

SEQ ID NO: 5022 - RNA, 21 nt, Artificial Sequence
  LDLR targeting guide sequence portion
ccuuucaucuuccauguuuga

SEQ ID NO: 5023 - RNA, 21 nt, Artificial Sequence
  LDLR targeting guide sequence portion
ccuuuccucgugaaggauaag

SEQ ID NO: 5024 - RNA, 21 nt, Artificial Sequence
  LDLR targeting guide sequence portion
ccuuuccuggcuuaaggaagg

SEQ ID NO: 5025 - RNA, 21 nt, Artificial Sequence
  LDLR targeting guide sequence portion
ccuuucugguuucggagcacg

SEQ ID NO: 5026 - RNA, 21 nt, Artificial Sequence
  LDLR targeting guide sequence portion
ccuuugcccugucacccccga

SEQ ID NO: 5027 - RNA, 21 nt, Artificial Sequence
  LDLR targeting guide sequence portion
cgaaaccagaaaggcuuauca

SEQ ID NO: 5028 - RNA, 21 nt, Artificial Sequence
  LDLR targeting guide sequence portion
cgaaagacacuggguggguca

SEQ ID NO: 5029 - RNA, 21 nt, Artificial Sequence
  LDLR targeting guide sequence portion
cgaacuggacugugugcaacg

SEQ ID NO: 5030 - RNA, 21 nt, Artificial Sequence
  LDLR targeting guide sequence portion
cgaagccuguucugccuccca

SEQ ID NO: 5031 - RNA, 21 nt, Artificial Sequence
  LDLR targeting guide sequence portion
cgaaucaugacccacccagug

SEQ ID NO: 5032 - RNA, 21 nt, Artificial Sequence
  LDLR targeting guide sequence portion
cgacaagauuggggaagugaa

SEQ ID NO: 5033 - RNA, 21 nt, Artificial Sequence
  LDLR targeting guide sequence portion
cgacaauggcaguucucgaua

SEQ ID NO: 5034 - RNA, 21 nt, Artificial Sequence
  LDLR targeting guide sequence portion
cgacagaaaacagugcaaaau

SEQ ID NO: 5035 - RNA, 21 nt, Artificial Sequence
  LDLR targeting guide sequence portion
cgacagccucaaaugccugag

SEQ ID NO: 5036 - RNA, 21 nt, Artificial Sequence
  LDLR targeting guide sequence portion
cgaccccuacccacuuccauu

SEQ ID NO: 5037 - RNA, 21 nt, Artificial Sequence
  LDLR targeting guide sequence portion
cgacgccaugaaucccuuucc

SEQ ID NO: 5038 - RNA, 21 nt, Artificial Sequence
  LDLR targeting guide sequence portion
cgagaacugccauugucgucu

SEQ ID NO: 5039 - RNA, 21 nt, Artificial Sequence
  LDLR targeting guide sequence portion
cgagaauagucacugaacaaa

SEQ ID NO: 5040 - RNA, 21 nt, Artificial Sequence
  LDLR targeting guide sequence portion
cgagaccaaacucauucacca

SEQ ID NO: 5041 - RNA, 21 nt, Artificial Sequence
  LDLR targeting guide sequence portion
cgagaucccaucucuacaaaa

SEQ ID NO: 5042 - RNA, 21 nt, Artificial Sequence
  LDLR targeting guide sequence portion
cgaggaaaggaagaaaccaaa

SEQ ID NO: 5043 - RNA, 21 nt, Artificial Sequence
  LDLR targeting guide sequence portion
cgaggucucaggaaggguucu

SEQ ID NO: 5044 - RNA, 21 nt, Artificial Sequence
  LDLR targeting guide sequence portion
cgagguggguuuguaccuucc

SEQ ID NO: 5045 - RNA, 21 nt, Artificial Sequence
  LDLR targeting guide sequence portion
cgauauucacgaucacggcuu

SEQ ID NO: 5046 - RNA, 21 nt, Artificial Sequence
  LDLR targeting guide sequence portion
cgaucacggcuuugaaguccc

SEQ ID NO: 5047 - RNA, 21 nt, Artificial Sequence
  LDLR targeting guide sequence portion
cgauccagacuggaggauuua

SEQ ID NO: 5048 - RNA, 21 nt, Artificial Sequence
  LDLR targeting guide sequence portion
cgauuucagaaagaaccugaa

SEQ ID NO: 5049 - RNA, 21 nt, Artificial Sequence
  LDLR targeting guide sequence portion
cgcauuuacgugcuccgaaac

SEQ ID NO: 5050 - RNA, 21 nt, Artificial Sequence
  LDLR targeting guide sequence portion
cgccacgucauccuccagacu

SEQ ID NO: 5051 - RNA, 21 nt, Artificial Sequence
  LDLR targeting guide sequence portion
cgccaugaaucccuuuccugg

SEQ ID NO: 5052 - RNA, 21 nt, Artificial Sequence
  LDLR targeting guide sequence portion
cgccaugccuggccagaggcc

SEQ ID NO: 5053 - RNA, 21 nt, Artificial Sequence
  LDLR targeting guide sequence portion
cgcccaccuagugcuuccacu

SEQ ID NO: 5054 - RNA, 21 nt, Artificial Sequence
  LDLR targeting guide sequence portion
cgcccggccucaccgugcaug

SEQ ID NO: 5055 - RNA, 21 nt, Artificial Sequence
  LDLR targeting guide sequence portion
cgccggccuuguuuuauucaa

SEQ ID NO: 5056 - RNA, 21 nt, Artificial Sequence
  LDLR targeting guide sequence portion
cgccguguuacuguugcacug

SEQ ID NO: 5057 - RNA, 21 nt, Artificial Sequence
  LDLR targeting guide sequence portion
cgcgggagucugacggaggcu

SEQ ID NO: 5058 - RNA, 21 nt, Artificial Sequence
  LDLR targeting guide sequence portion
cgcgugaagaugucacaaggg

SEQ ID NO: 5059 - RNA, 21 nt, Artificial Sequence
  LDLR targeting guide sequence portion
cgcuuuguugcucaggccugg

SEQ ID NO: 5060 - RNA, 21 nt, Artificial Sequence
  LDLR targeting guide sequence portion
cgcuuuuugggagaaugaugu

SEQ ID NO: 5061 - RNA, 21 nt, Artificial Sequence
  LDLR targeting guide sequence portion
cggaaaugaucuggcugaauc

SEQ ID NO: 5062 - RNA, 21 nt, Artificial Sequence
  LDLR targeting guide sequence portion
cggacagugcccaugcaaugg

SEQ ID NO: 5063 - RNA, 21 nt, Artificial Sequence
  LDLR targeting guide sequence portion
cggacauaaagacgacaaugg

SEQ ID NO: 5064 - RNA, 21 nt, Artificial Sequence
  LDLR targeting guide sequence portion
cggacaucagugcaacaguaa

SEQ ID NO: 5065 - RNA, 21 nt, Artificial Sequence
  LDLR targeting guide sequence portion
cggagagacagugacagccuc

SEQ ID NO: 5066 - RNA, 21 nt, Artificial Sequence
  LDLR targeting guide sequence portion
cggagcacguaaaugcguccc

SEQ ID NO: 5067 - RNA, 21 nt, Artificial Sequence
  LDLR targeting guide sequence portion
cggaggcugucacugucucuc

SEQ ID NO: 5068 - RNA, 21 nt, Artificial Sequence
  LDLR targeting guide sequence portion
cggauucagccagaucauuuc

SEQ ID NO: 5069 - RNA, 21 nt, Artificial Sequence
  LDLR targeting guide sequence portion
cggcauucauugacacgggcu

SEQ ID NO: 5070 - RNA, 21 nt, Artificial Sequence
  LDLR targeting guide sequence portion
cggccaagguaaccggguguc

SEQ ID NO: 5071 - RNA, 21 nt, Artificial Sequence
  LDLR targeting guide sequence portion
cggccucaccgugcauguuuu

SEQ ID NO: 5072 - RNA, 21 nt, Artificial Sequence
  LDLR targeting guide sequence portion
cggccuuguuuuauucaaaga

SEQ ID NO: 5073 - RNA, 21 nt, Artificial Sequence
  LDLR targeting guide sequence portion
cggcgaggucucaggaagggu

SEQ ID NO: 5074 - RNA, 21 nt, Artificial Sequence
  LDLR targeting guide sequence portion
cggcgauuucagaaagaaccu

SEQ ID NO: 5075 - RNA, 21 nt, Artificial Sequence
  LDLR targeting guide sequence portion
cggcuuugaagucccggucaa

SEQ ID NO: 5076 - RNA, 21 nt, Artificial Sequence
  LDLR targeting guide sequence portion
cgggaauggaaguggguaggg

SEQ ID NO: 5077 - RNA, 21 nt, Artificial Sequence
  LDLR targeting guide sequence portion
cgggacccccuggcccugccu

SEQ ID NO: 5078 - RNA, 21 nt, Artificial Sequence
  LDLR targeting guide sequence portion
cgggacuccaggcagauguuc

SEQ ID NO: 5079 - RNA, 21 nt, Artificial Sequence
  LDLR targeting guide sequence portion
cgggacuucaaagccgugauc

SEQ ID NO: 5080 - RNA, 21 nt, Artificial Sequence
  LDLR targeting guide sequence portion
cgggacuucagguucuuucug

SEQ ID NO: 5081 - RNA, 21 nt, Artificial Sequence
  LDLR targeting guide sequence portion
cgggaggaugggcaccaggcu

SEQ ID NO: 5082 - RNA, 21 nt, Artificial Sequence
  LDLR targeting guide sequence portion
cgggagucugacggaggcugu

SEQ ID NO: 5083 - RNA, 21 nt, Artificial Sequence
  LDLR targeting guide sequence portion
cgggccuguuucucuuauccu

SEQ ID NO: 5084 - RNA, 21 nt, Artificial Sequence
  LDLR targeting guide sequence portion
cgggcuuucccuggccuggga

SEQ ID NO: 5085 - RNA, 21 nt, Artificial Sequence
  LDLR targeting guide sequence portion
cggggacagagaggggcaggu

SEQ ID NO: 5086 - RNA, 21 nt, Artificial Sequence
  LDLR targeting guide sequence portion
cggggacaucauucucccaaa

SEQ ID NO: 5087 - RNA, 21 nt, Artificial Sequence
  LDLR targeting guide sequence portion
cggggcccuguguaggggguu

SEQ ID NO: 5088 - RNA, 21 nt, Artificial Sequence
  LDLR targeting guide sequence portion
cggggggaccaggaugacacc

SEQ ID NO: 5089 - RNA, 21 nt, Artificial Sequence
  LDLR targeting guide sequence portion
cgggggugacagggcaaaggc

SEQ ID NO: 5090 - RNA, 21 nt, Artificial Sequence
  LDLR targeting guide sequence portion
cgggugucucaggcacuuaau

SEQ ID NO: 5091 - RNA, 21 nt, Artificial Sequence
  LDLR targeting guide sequence portion
cggucaaccugccccucucug

SEQ ID NO: 5092 - RNA, 21 nt, Artificial Sequence
  LDLR targeting guide sequence portion
cggugaggccgggcgcagugg

SEQ ID NO: 5093 - RNA, 21 nt, Artificial Sequence
  LDLR targeting guide sequence portion
cggugccaccacggauucagc

SEQ ID NO: 5094 - RNA, 21 nt, Artificial Sequence
  LDLR targeting guide sequence portion
cgguggagagaaacucaaaac

SEQ ID NO: 5095 - RNA, 21 nt, Artificial Sequence
  LDLR targeting guide sequence portion
cgguuaccuuggccgugagga

SEQ ID NO: 5096 - RNA, 21 nt, Artificial Sequence
  LDLR targeting guide sequence portion
cguaaaugcgucccuguacag

SEQ ID NO: 5097 - RNA, 21 nt, Artificial Sequence
  LDLR targeting guide sequence portion
cguacccagcugauuuuuaac

SEQ ID NO: 5098 - RNA, 21 nt, Artificial Sequence
  LDLR targeting guide sequence portion
cgucaaacgauccagacugga

SEQ ID NO: 5099 - RNA, 21 nt, Artificial Sequence
  LDLR targeting guide sequence portion
cgucagacucccgcgugaaga

SEQ ID NO: 5100 - RNA, 21 nt, Artificial Sequence
  LDLR targeting guide sequence portion
cgucauccuccagacugacca

SEQ ID NO: 5101 - RNA, 21 nt, Artificial Sequence
  LDLR targeting guide sequence portion
cgucccugcccagaacccuuc

SEQ ID NO: 5102 - RNA, 21 nt, Artificial Sequence
  LDLR targeting guide sequence portion
cgucccuguacagauaguggg

SEQ ID NO: 5103 - RNA, 21 nt, Artificial Sequence
  LDLR targeting guide sequence portion
cgucggaaaugaucuggcuga

SEQ ID NO: 5104 - RNA, 21 nt, Artificial Sequence
  LDLR targeting guide sequence portion
cgucuuuauguccgcccaccu

SEQ ID NO: 5105 - RNA, 21 nt, Artificial Sequence
  LDLR targeting guide sequence portion
cgugaacaucugccuggaguc

SEQ ID NO: 5106 - RNA, 21 nt, Artificial Sequence
  LDLR targeting guide sequence portion
cgugaagaugucacaagggau

SEQ ID NO: 5107 - RNA, 21 nt, Artificial Sequence
  LDLR targeting guide sequence portion
cgugaaggauaagagaaacag

SEQ ID NO: 5108 - RNA, 21 nt, Artificial Sequence
  LDLR targeting guide sequence portion
cgugaauaucgagaacugcca

SEQ ID NO: 5109 - RNA, 21 nt, Artificial Sequence
  LDLR targeting guide sequence portion
cgugacacaauccucaaacau

SEQ ID NO: 5110 - RNA, 21 nt, Artificial Sequence
  LDLR targeting guide sequence portion
cgugagccacugcgcccggcc

SEQ ID NO: 5111 - RNA, 21 nt, Artificial Sequence
  LDLR targeting guide sequence portion
cgugagcuaugauuaugccac

SEQ ID NO: 5112 - RNA, 21 nt, Artificial Sequence
  LDLR targeting guide sequence portion
cgugaggacacguggccugca

SEQ ID NO: 5113 - RNA, 21 nt, Artificial Sequence
  LDLR targeting guide sequence portion
cgugaggcaccugugucuggc

SEQ ID NO: 5114 - RNA, 21 nt, Artificial Sequence
  LDLR targeting guide sequence portion
cgugauaagccuuucugguuu

SEQ ID NO: 5115 - RNA, 21 nt, Artificial Sequence
  LDLR targeting guide sequence portion
cgugaucgugaauaucgagaa

SEQ ID NO: 5116 - RNA, 21 nt, Artificial Sequence
  LDLR targeting guide sequence portion
cgugcauguuuuaaacacaua

SEQ ID NO: 5117 - RNA, 21 nt, Artificial Sequence
  LDLR targeting guide sequence portion
cgugccaccguacccagcuga

SEQ ID NO: 5118 - RNA, 21 nt, Artificial Sequence
  LDLR targeting guide sequence portion
cgugcuccgaaaccagaaagg

SEQ ID NO: 5119 - RNA, 21 nt, Artificial Sequence
  LDLR targeting guide sequence portion
cguggccugcacccaggugug

SEQ ID NO: 5120 - RNA, 21 nt, Artificial Sequence
  LDLR targeting guide sequence portion
cguggcgugaacaucugccug

SEQ ID NO: 5121 - RNA, 21 nt, Artificial Sequence
  LDLR targeting guide sequence portion
cguggucuccuugcacuuucu

SEQ ID NO: 5122 - RNA, 21 nt, Artificial Sequence
  LDLR targeting guide sequence portion
cgugguggcaccgagaccaaa

SEQ ID NO: 5123 - RNA, 21 nt, Artificial Sequence
  LDLR targeting guide sequence portion
cgugucaaugaaugccgggga

SEQ ID NO: 5124 - RNA, 21 nt, Artificial Sequence
  LDLR targeting guide sequence portion
cguguccucacggccaaggua

SEQ ID NO: 5125 - RNA, 21 nt, Artificial Sequence
  LDLR targeting guide sequence portion
cguguguguugggaugggauc

SEQ ID NO: 5126 - RNA, 21 nt, Artificial Sequence
  LDLR targeting guide sequence portion
cguguuacuguugcacugaug

SEQ ID NO: 5127 - RNA, 21 nt, Artificial Sequence
  LDLR targeting guide sequence portion
cguguuuaccucuucuaugca

SEQ ID NO: 5128 - RNA, 21 nt, Artificial Sequence
  LDLR targeting guide sequence portion
cguugacuccugaguuuaggg

SEQ ID NO: 5129 - RNA, 21 nt, Artificial Sequence
  LDLR targeting guide sequence portion
cguugauggguauguguuuaa

SEQ ID NO: 5130 - RNA, 21 nt, Artificial Sequence
  LDLR targeting guide sequence portion
cguugcacacaguccaguucg

SEQ ID NO: 5131 - RNA, 21 nt, Artificial Sequence
  LDLR targeting guide sequence portion
cguuggugccaucugcuguug

SEQ ID NO: 5132 - RNA, 21 nt, Artificial Sequence
  LDLR targeting guide sequence portion
cguuguauguaugaguggcuu

SEQ ID NO: 5133 - RNA, 21 nt, Artificial Sequence
  LDLR targeting guide sequence portion
cguuugacgggacuucagguu

SEQ ID NO: 5134 - RNA, 21 nt, Artificial Sequence
  LDLR targeting guide sequence portion
cuaaacucaggagucaacgug

SEQ ID NO: 5135 - RNA, 21 nt, Artificial Sequence
  LDLR targeting guide sequence portion
cuaaccuggcugucuagcaag

SEQ ID NO: 5136 - RNA, 21 nt, Artificial Sequence
  LDLR targeting guide sequence portion
cuaagccaaaccccuaaacuc

SEQ ID NO: 5137 - RNA, 21 nt, Artificial Sequence
  LDLR targeting guide sequence portion
cuacaaaaaccuucuauacag

SEQ ID NO: 5138 - RNA, 21 nt, Artificial Sequence
  LDLR targeting guide sequence portion
cuacacagggccccgagaaua

SEQ ID NO: 5139 - RNA, 21 nt, Artificial Sequence
  LDLR targeting guide sequence portion
cuacccacuuccauucccgug

SEQ ID NO: 5140 - RNA, 21 nt, Artificial Sequence
  LDLR targeting guide sequence portion
cuagacagccagguuagccuu

SEQ ID NO: 5141 - RNA, 21 nt, Artificial Sequence
  LDLR targeting guide sequence portion
cuagcaaggcuugcauagaag

SEQ ID NO: 5142 - RNA, 21 nt, Artificial Sequence
  LDLR targeting guide sequence portion
cuaggugggcggacauaaaga

SEQ ID NO: 5143 - RNA, 21 nt, Artificial Sequence
  LDLR targeting guide sequence portion
cuagugcuuccacuucuaugc

SEQ ID NO: 5144 - RNA, 21 nt, Artificial Sequence
  LDLR targeting guide sequence portion
cuauacagugguuuaaaaagu

SEQ ID NO: 5145 - RNA, 21 nt, Artificial Sequence
  LDLR targeting guide sequence portion
cuaucuguacagggacgcauu

SEQ ID NO: 5146 - RNA, 21 nt, Artificial Sequence
  LDLR targeting guide sequence portion
cuaugauuaugccacugcuuu

SEQ ID NO: 5147 - RNA, 21 nt, Artificial Sequence
  LDLR targeting guide sequence portion
cuaugcaaaugccuccaagcc

SEQ ID NO: 5148 - RNA, 21 nt, Artificial Sequence
  LDLR targeting guide sequence portion
cuaugcaagccuugcuagaca

SEQ ID NO: 5149 - RNA, 21 nt, Artificial Sequence
  LDLR targeting guide sequence portion
cuauucucggggcccugugua

SEQ ID NO: 5150 - RNA, 21 nt, Artificial Sequence
  LDLR targeting guide sequence portion
cuauuuauuuuugcaaacccu

SEQ ID NO: 5151 - RNA, 21 nt, Artificial Sequence
  LDLR targeting guide sequence portion
cucaaaacuuccuggagagaa

SEQ ID NO: 5152 - RNA, 21 nt, Artificial Sequence
  LDLR targeting guide sequence portion
cucaaacauggaagaugaaag

SEQ ID NO: 5153 - RNA, 21 nt, Artificial Sequence
  LDLR targeting guide sequence portion
cucaaaugccugagcucaaac

SEQ ID NO: 5154 - RNA, 21 nt, Artificial Sequence
  LDLR targeting guide sequence portion
cucaagugauccagcucagcc

SEQ ID NO: 5155 - RNA, 21 nt, Artificial Sequence
  LDLR targeting guide sequence portion
cucaccgugcauguuuuaaac

SEQ ID NO: 5156 - RNA, 21 nt, Artificial Sequence
  LDLR targeting guide sequence portion
cucacgacagccucaaaugcc

SEQ ID NO: 5157 - RNA, 21 nt, Artificial Sequence
  LDLR targeting guide sequence portion
cucacggccaagguaaccggg

SEQ ID NO: 5158 - RNA, 21 nt, Artificial Sequence
  LDLR targeting guide sequence portion
cucagccucgccaugccuggc

SEQ ID NO: 5159 - RNA, 21 nt, Artificial Sequence
  LDLR targeting guide sequence portion
cucaggaaggguucugggcag

SEQ ID NO: 5160 - RNA, 21 nt, Artificial Sequence
  LDLR targeting guide sequence portion
cucaggagucaacguguuuac

SEQ ID NO: 5161 - RNA, 21 nt, Artificial Sequence
  LDLR targeting guide sequence portion
cucaggcacuuaauaaauauu

SEQ ID NO: 5162 - RNA, 21 nt, Artificial Sequence
  LDLR targeting guide sequence portion
cucaggcauuugaggcugucg

SEQ ID NO: 5163 - RNA, 21 nt, Artificial Sequence
  LDLR targeting guide sequence portion
cucaggccuggucuccaacuc

SEQ ID NO: 5164 - RNA, 21 nt, Artificial Sequence
  LDLR targeting guide sequence portion
cucaggcucugccucugggaa

SEQ ID NO: 5165 - RNA, 21 nt, Artificial Sequence
  LDLR targeting guide sequence portion
cucaguucagaguuguacacu

SEQ ID NO: 5166 - RNA, 21 nt, Artificial Sequence
  LDLR targeting guide sequence portion
cucauacauacaacggggaca

SEQ ID NO: 5167 - RNA, 21 nt, Artificial Sequence
  LDLR targeting guide sequence portion
cucauccaccaaucucuaagc

SEQ ID NO: 5168 - RNA, 21 nt, Artificial Sequence
  LDLR targeting guide sequence portion
cucauucaccaaaugaugcca

SEQ ID NO: 5169 - RNA, 21 nt, Artificial Sequence
  LDLR targeting guide sequence portion
cuccaagccauucacuucccc

SEQ ID NO: 5170 - RNA, 21 nt, Artificial Sequence
  LDLR targeting guide sequence portion
cuccaccgugacacaauccuc

SEQ ID NO: 5171 - RNA, 21 nt, Artificial Sequence
  LDLR targeting guide sequence portion
cuccaggaaguuuugaguuuc

SEQ ID NO: 5172 - RNA, 21 nt, Artificial Sequence
  LDLR targeting guide sequence portion
cuccaggcagauguucacgcc

SEQ ID NO: 5173 - RNA, 21 nt, Artificial Sequence
  LDLR targeting guide sequence portion
cuccagucuggaucguuugac

SEQ ID NO: 5174 - RNA, 21 nt, Artificial Sequence
  LDLR targeting guide sequence portion
cuccauuucucuccaggaagu

SEQ ID NO: 5175 - RNA, 21 nt, Artificial Sequence
  LDLR targeting guide sequence portion
cucccaaaaagcguugcacac

SEQ ID NO: 5176 - RNA, 21 nt, Artificial Sequence
  LDLR targeting guide sequence portion
cucccaccucagccucgccau

SEQ ID NO: 5177 - RNA, 21 nt, Artificial Sequence
  LDLR targeting guide sequence portion
cucccagaagccacucauaca

SEQ ID NO: 5178 - RNA, 21 nt, Artificial Sequence
  LDLR targeting guide sequence portion
cuccccuuucaucuuccaugu

SEQ ID NO: 5179 - RNA, 21 nt, Artificial Sequence
  LDLR targeting guide sequence portion
cucccgaccccuacccacuuc

SEQ ID NO: 5180 - RNA, 21 nt, Artificial Sequence
  LDLR targeting guide sequence portion
cucccgcgugaagaugucaca

SEQ ID NO: 5181 - RNA, 21 nt, Artificial Sequence
  LDLR targeting guide sequence portion
cuccgaaaccagaaaggcuua

SEQ ID NO: 5182 - RNA, 21 nt, Artificial Sequence
  LDLR targeting guide sequence portion
cuccggacaucagugcaacag

SEQ ID NO: 5183 - RNA, 21 nt, Artificial Sequence
  LDLR targeting guide sequence portion
cuccgucagacucccgcguga

SEQ ID NO: 5184 - RNA, 21 nt, Artificial Sequence
  LDLR targeting guide sequence portion
cuccugaacucaagugaucca

SEQ ID NO: 5185 - RNA, 21 nt, Artificial Sequence
  LDLR targeting guide sequence portion
cuccugaguuuagggguuugg

SEQ ID NO: 5186 - RNA, 21 nt, Artificial Sequence
  LDLR targeting guide sequence portion
cuccuugcacuuucucaguuc

SEQ ID NO: 5187 - RNA, 21 nt, Artificial Sequence
  LDLR targeting guide sequence portion
cucgaaagacacugggugggu

SEQ ID NO: 5188 - RNA, 21 nt, Artificial Sequence
  LDLR targeting guide sequence portion
cucgauauucacgaucacggc

SEQ ID NO: 5189 - RNA, 21 nt, Artificial Sequence
  LDLR targeting guide sequence portion
cucgaucauggcucacugcaa

SEQ ID NO: 5190 - RNA, 21 nt, Artificial Sequence
  LDLR targeting guide sequence portion
cucgccaugccuggccagagg

SEQ ID NO: 5191 - RNA, 21 nt, Artificial Sequence
  LDLR targeting guide sequence portion
cucgccggccuuguuuuauuc

SEQ ID NO: 5192 - RNA, 21 nt, Artificial Sequence
  LDLR targeting guide sequence portion
cucgcuuuguugcucaggccu

SEQ ID NO: 5193 - RNA, 21 nt, Artificial Sequence
  LDLR targeting guide sequence portion
cucggggcccuguguaggggg

SEQ ID NO: 5194 - RNA, 21 nt, Artificial Sequence
  LDLR targeting guide sequence portion
cucggugccaccacggauuca

SEQ ID NO: 5195 - RNA, 21 nt, Artificial Sequence
  LDLR targeting guide sequence portion
cucgugaaggauaagagaaac

SEQ ID NO: 5196 - RNA, 21 nt, Artificial Sequence
  LDLR targeting guide sequence portion
cucuaagccaaaccccuaaac

SEQ ID NO: 5197 - RNA, 21 nt, Artificial Sequence
  LDLR targeting guide sequence portion
cucuccaccgugacacaaucc

SEQ ID NO: 5198 - RNA, 21 nt, Artificial Sequence
  LDLR targeting guide sequence portion
cucuccaggaaguuuugaguu

SEQ ID NO: 5199 - RNA, 21 nt, Artificial Sequence
  LDLR targeting guide sequence portion
cucuccggacaucagugcaac

SEQ ID NO: 5200 - RNA, 21 nt, Artificial Sequence
  LDLR targeting guide sequence portion
cucucuguccccggcauucau

SEQ ID NO: 5201 - RNA, 21 nt, Artificial Sequence
  LDLR targeting guide sequence portion
cucugaaaugccucuucuuua

SEQ ID NO: 5202 - RNA, 21 nt, Artificial Sequence
  LDLR targeting guide sequence portion
cucugaacugagaaagugcaa

SEQ ID NO: 5203 - RNA, 21 nt, Artificial Sequence
  LDLR targeting guide sequence portion
cucugccucugggaaguggca

SEQ ID NO: 5204 - RNA, 21 nt, Artificial Sequence
  LDLR targeting guide sequence portion
cucuggcaggcaaugcuuugg

SEQ ID NO: 5205 - RNA, 21 nt, Artificial Sequence
  LDLR targeting guide sequence portion
cucuggccaggcauggcgagg

SEQ ID NO: 5206 - RNA, 21 nt, Artificial Sequence
  LDLR targeting guide sequence portion
cucugggaaguggcaucauuu

SEQ ID NO: 5207 - RNA, 21 nt, Artificial Sequence
  LDLR targeting guide sequence portion
cucugggccugacauccccuc

SEQ ID NO: 5208 - RNA, 21 nt, Artificial Sequence
  LDLR targeting guide sequence portion
cucuguccccggcauucauug

SEQ ID NO: 5209 - RNA, 21 nt, Artificial Sequence
  LDLR targeting guide sequence portion
cucugucuuugaauaaaacaa

SEQ ID NO: 5210 - RNA, 21 nt, Artificial Sequence
  LDLR targeting guide sequence portion
cucuuaaaaaaugaauuuggc

SEQ ID NO: 5211 - RNA, 21 nt, Artificial Sequence
  LDLR targeting guide sequence portion
cucuuauccuucacgaggaaa

SEQ ID NO: 5212 - RNA, 21 nt, Artificial Sequence
  LDLR targeting guide sequence portion
cucuucuaugcaagccuugcu

SEQ ID NO: 5213 - RNA, 21 nt, Artificial Sequence
  LDLR targeting guide sequence portion
cugaaauagggucuucaucug

SEQ ID NO: 5214 - RNA, 21 nt, Artificial Sequence
  LDLR targeting guide sequence portion
cugaaaucgccguguuacugu

SEQ ID NO: 5215 - RNA, 21 nt, Artificial Sequence
  LDLR targeting guide sequence portion
cugaaaugccucuucuuuaug

SEQ ID NO: 5216 - RNA, 21 nt, Artificial Sequence
  LDLR targeting guide sequence portion
cugaacaaauacagcaaccag

SEQ ID NO: 5217 - RNA, 21 nt, Artificial Sequence
  LDLR targeting guide sequence portion
cugaacucaagugauccagcu

SEQ ID NO: 5218 - RNA, 21 nt, Artificial Sequence
  LDLR targeting guide sequence portion
cugaacugagaaagugcaagg

SEQ ID NO: 5219 - RNA, 21 nt, Artificial Sequence
  LDLR targeting guide sequence portion
cugaagucccgucaaacgauc

SEQ ID NO: 5220 - RNA, 21 nt, Artificial Sequence
  LDLR targeting guide sequence portion
cugaauccgugguggcaccga

SEQ ID NO: 5221 - RNA, 21 nt, Artificial Sequence
  LDLR targeting guide sequence portion
cugacagccacaccugggugc

SEQ ID NO: 5222 - RNA, 21 nt, Artificial Sequence
  LDLR targeting guide sequence portion
cugacauccccuccccuuuca

SEQ ID NO: 5223 - RNA, 21 nt, Artificial Sequence
  LDLR targeting guide sequence portion
cugacggaggcugucacuguc

SEQ ID NO: 5224 - RNA, 21 nt, Artificial Sequence
  LDLR targeting guide sequence portion
cugagaaagugcaaggagacc

SEQ ID NO: 5225 - RNA, 21 nt, Artificial Sequence
  LDLR targeting guide sequence portion
cugagacacccgguuaccuug

SEQ ID NO: 5226 - RNA, 21 nt, Artificial Sequence
  LDLR targeting guide sequence portion
cugagaccucgccggccuugu

SEQ ID NO: 5227 - RNA, 21 nt, Artificial Sequence
  LDLR targeting guide sequence portion
cugagcaacaaagcgagaucc

SEQ ID NO: 5228 - RNA, 21 nt, Artificial Sequence
  LDLR targeting guide sequence portion
cugagcuggaucacuugaguu

SEQ ID NO: 5229 - RNA, 21 nt, Artificial Sequence
  LDLR targeting guide sequence portion
cugagucacuggucacccuua

SEQ ID NO: 5230 - RNA, 21 nt, Artificial Sequence
  LDLR targeting guide sequence portion
cugaguuuagggguuuggcuu

SEQ ID NO: 5231 - RNA, 21 nt, Artificial Sequence
  LDLR targeting guide sequence portion
cugauguccggagagacagug

SEQ ID NO: 5232 - RNA, 21 nt, Artificial Sequence
  LDLR targeting guide sequence portion
cugcacccagguguggcuguc

SEQ ID NO: 5233 - RNA, 21 nt, Artificial Sequence
  LDLR targeting guide sequence portion
cugccauugucgucuuuaugu

SEQ ID NO: 5234 - RNA, 21 nt, Artificial Sequence
  LDLR targeting guide sequence portion
cugcccagaacccuuccugag

SEQ ID NO: 5235 - RNA, 21 nt, Artificial Sequence
  LDLR targeting guide sequence portion
cugccccucucuguccccggc

SEQ ID NO: 5236 - RNA, 21 nt, Artificial Sequence
  LDLR targeting guide sequence portion
cugccucauccaccaaucucu

SEQ ID NO: 5237 - RNA, 21 nt, Artificial Sequence
  LDLR targeting guide sequence portion
cugccucccagaugaauaaau

SEQ ID NO: 5238 - RNA, 21 nt, Artificial Sequence
  LDLR targeting guide sequence portion
cugccucugggaaguggcauc

SEQ ID NO: 5239 - RNA, 21 nt, Artificial Sequence
  LDLR targeting guide sequence portion
cugccuggagucccgucccug

SEQ ID NO: 5240 - RNA, 21 nt, Artificial Sequence
  LDLR targeting guide sequence portion
cugcgcccggccucaccgugc

SEQ ID NO: 5241 - RNA, 21 nt, Artificial Sequence
  LDLR targeting guide sequence portion
cugcugaugcaccaugcaugg

SEQ ID NO: 5242 - RNA, 21 nt, Artificial Sequence
  LDLR targeting guide sequence portion
cugcuguuguguguugaaagc

SEQ ID NO: 5243 - RNA, 21 nt, Artificial Sequence
  LDLR targeting guide sequence portion
cugcuuuccagccugggcaac

SEQ ID NO: 5244 - RNA, 21 nt, Artificial Sequence
  LDLR targeting guide sequence portion
cuggaaagcaguggcauaauc

SEQ ID NO: 5245 - RNA, 21 nt, Artificial Sequence
  LDLR targeting guide sequence portion
cuggacugugugcaacgcuuu

SEQ ID NO: 5246 - RNA, 21 nt, Artificial Sequence
  LDLR targeting guide sequence portion
cuggagagaaauggagguguc

SEQ ID NO: 5247 - RNA, 21 nt, Artificial Sequence
  LDLR targeting guide sequence portion
cuggaggaugacguggcguga

SEQ ID NO: 5248 - RNA, 21 nt, Artificial Sequence
  LDLR targeting guide sequence portion
cuggagucccgucccugccca

SEQ ID NO: 5249 - RNA, 21 nt, Artificial Sequence
  LDLR targeting guide sequence portion
cuggaucacuugaguucagga

SEQ ID NO: 5250 - RNA, 21 nt, Artificial Sequence
  LDLR targeting guide sequence portion
cuggaucguuugacgggacuu

SEQ ID NO: 5251 - RNA, 21 nt, Artificial Sequence
  LDLR targeting guide sequence portion
cuggcaggcaaugcuuugguc

SEQ ID NO: 5252 - RNA, 21 nt, Artificial Sequence
  LDLR targeting guide sequence portion
cuggccaaauucauuuuuuaa

SEQ ID NO: 5253 - RNA, 21 nt, Artificial Sequence
  LDLR targeting guide sequence portion
cuggccagaggccaugggcug

SEQ ID NO: 5254 - RNA, 21 nt, Artificial Sequence
  LDLR targeting guide sequence portion
cuggccaggcauggcgaggcu

SEQ ID NO: 5255 - RNA, 21 nt, Artificial Sequence
  LDLR targeting guide sequence portion
cuggcccugccucauccacca

SEQ ID NO: 5256 - RNA, 21 nt, Artificial Sequence
  LDLR targeting guide sequence portion
cuggccugggaucccauccca

SEQ ID NO: 5257 - RNA, 21 nt, Artificial Sequence
  LDLR targeting guide sequence portion
cuggcugaauccgugguggca

SEQ ID NO: 5258 - RNA, 21 nt, Artificial Sequence
  LDLR targeting guide sequence portion
cuggcugucuagcaaggcuug

SEQ ID NO: 5259 - RNA, 21 nt, Artificial Sequence
  LDLR targeting guide sequence portion
cuggcuuaaggaagguacaaa

SEQ ID NO: 5260 - RNA, 21 nt, Artificial Sequence
  LDLR targeting guide sequence portion
cugggaaguggcaucauuugg

SEQ ID NO: 5261 - RNA, 21 nt, Artificial Sequence
  LDLR targeting guide sequence portion
cugggagaugggugucacuuu

SEQ ID NO: 5262 - RNA, 21 nt, Artificial Sequence
  LDLR targeting guide sequence portion
cugggaggcagaacaggcuuc

SEQ ID NO: 5263 - RNA, 21 nt, Artificial Sequence
  LDLR targeting guide sequence portion
cugggaucccaucccaacaca

SEQ ID NO: 5264 - RNA, 21 nt, Artificial Sequence
  LDLR targeting guide sequence portion
cugggauuacaggcgugaggc

SEQ ID NO: 5265 - RNA, 21 nt, Artificial Sequence
  LDLR targeting guide sequence portion
cugggcagggacgggacucca

SEQ ID NO: 5266 - RNA, 21 nt, Artificial Sequence
  LDLR targeting guide sequence portion
cugggccugacauccccuccc

SEQ ID NO: 5267 - RNA, 21 nt, Artificial Sequence
  LDLR targeting guide sequence portion
cuggggacaauugccaauccc

SEQ ID NO: 5268 - RNA, 21 nt, Artificial Sequence
  LDLR targeting guide sequence portion
cuggguacgguggcacgugcc

SEQ ID NO: 5269 - RNA, 21 nt, Artificial Sequence
  LDLR targeting guide sequence portion
cugggugcaggccacgugucc

SEQ ID NO: 5270 - RNA, 21 nt, Artificial Sequence
  LDLR targeting guide sequence portion
cugggugggucaugauucggg

SEQ ID NO: 5271 - RNA, 21 nt, Artificial Sequence
  LDLR targeting guide sequence portion
cuggucacccuuaauauuuau

SEQ ID NO: 5272 - RNA, 21 nt, Artificial Sequence
  LDLR targeting guide sequence portion
cugguccccccgggccuguuu

SEQ ID NO: 5273 - RNA, 21 nt, Artificial Sequence
  LDLR targeting guide sequence portion
cuggugcccauccucccgacc

SEQ ID NO: 5274 - RNA, 21 nt, Artificial Sequence
  LDLR targeting guide sequence portion
cugguguccugacagccacac

SEQ ID NO: 5275 - RNA, 21 nt, Artificial Sequence
  LDLR targeting guide sequence portion
cugguugcuguauuuguucag

SEQ ID NO: 5276 - RNA, 21 nt, Artificial Sequence
  LDLR targeting guide sequence portion
cugguuucggagcacguaaau

SEQ ID NO: 5277 - RNA, 21 nt, Artificial Sequence
  LDLR targeting guide sequence portion
cuguacagauaguggggauuu

SEQ ID NO: 5278 - RNA, 21 nt, Artificial Sequence
  LDLR targeting guide sequence portion
cuguacagggacgcauuuacg

SEQ ID NO: 5279 - RNA, 21 nt, Artificial Sequence
  LDLR targeting guide sequence portion
cuguauagaagguuuuuguag

SEQ ID NO: 5280 - RNA, 21 nt, Artificial Sequence
  LDLR targeting guide sequence portion
cuguauuuguucagugacuau

SEQ ID NO: 5281 - RNA, 21 nt, Artificial Sequence
  LDLR targeting guide sequence portion
cugucacccccgaaucaugac

SEQ ID NO: 5282 - RNA, 21 nt, Artificial Sequence
  LDLR targeting guide sequence portion
cugucacugucucuccggaca

SEQ ID NO: 5283 - RNA, 21 nt, Artificial Sequence
  LDLR targeting guide sequence portion
cugucaggacaccagccuggu

SEQ ID NO: 5284 - RNA, 21 nt, Artificial Sequence
  LDLR targeting guide sequence portion
cuguccccggcauucauugac

SEQ ID NO: 5285 - RNA, 21 nt, Artificial Sequence
  LDLR targeting guide sequence portion
cuguccgaagccuguucugcc

SEQ ID NO: 5286 - RNA, 21 nt, Artificial Sequence
  LDLR targeting guide sequence portion
cugucguguguguugggaugg

SEQ ID NO: 5287 - RNA, 21 nt, Artificial Sequence
  LDLR targeting guide sequence portion
cugucuagcaaggcuugcaua

SEQ ID NO: 5288 - RNA, 21 nt, Artificial Sequence
  LDLR targeting guide sequence portion
cugucucuccggacaucagug

SEQ ID NO: 5289 - RNA, 21 nt, Artificial Sequence
  LDLR targeting guide sequence portion
cugucuuugaauaaaacaagg

SEQ ID NO: 5290 - RNA, 21 nt, Artificial Sequence
  LDLR targeting guide sequence portion
cuguguacauuuggcauuugu

SEQ ID NO: 5291 - RNA, 21 nt, Artificial Sequence
  LDLR targeting guide sequence portion
cuguguaggggguuauugccu

SEQ ID NO: 5292 - RNA, 21 nt, Artificial Sequence
  LDLR targeting guide sequence portion
cugugucuggccaaauucauu

SEQ ID NO: 5293 - RNA, 21 nt, Artificial Sequence
  LDLR targeting guide sequence portion
cugugugcaacgcuuuuuggg

SEQ ID NO: 5294 - RNA, 21 nt, Artificial Sequence
  LDLR targeting guide sequence portion
cuguugcacugauguccggag

SEQ ID NO: 5295 - RNA, 21 nt, Artificial Sequence
  LDLR targeting guide sequence portion
cuguuguguguugaaagccac

SEQ ID NO: 5296 - RNA, 21 nt, Artificial Sequence
  LDLR targeting guide sequence portion
cuguuucucuuauccuucacg

SEQ ID NO: 5297 - RNA, 21 nt, Artificial Sequence
  LDLR targeting guide sequence portion
cuguuuucugucguguguguu

SEQ ID NO: 5298 - RNA, 21 nt, Artificial Sequence
  LDLR targeting guide sequence portion
cuuaaaaaaugaauuuggcca

SEQ ID NO: 5299 - RNA, 21 nt, Artificial Sequence
  LDLR targeting guide sequence portion
cuuaagccaggaaagggauuc

SEQ ID NO: 5300 - RNA, 21 nt, Artificial Sequence
  LDLR targeting guide sequence portion
cuuaaggaagguacaaaccca

SEQ ID NO: 5301 - RNA, 21 nt, Artificial Sequence
  LDLR targeting guide sequence portion
cuuaauaaauauuaaggguga

SEQ ID NO: 5302 - RNA, 21 nt, Artificial Sequence
  LDLR targeting guide sequence portion
cuuacuauguugcccaggcug

SEQ ID NO: 5303 - RNA, 21 nt, Artificial Sequence
  LDLR targeting guide sequence portion
cuuagagauugguggaugagg

SEQ ID NO: 5304 - RNA, 21 nt, Artificial Sequence
  LDLR targeting guide sequence portion
cuuaucacgguucccugcacu

SEQ ID NO: 5305 - RNA, 21 nt, Artificial Sequence
  LDLR targeting guide sequence portion
cuuauccuucacgaggaaagg

SEQ ID NO: 5306 - RNA, 21 nt, Artificial Sequence
  LDLR targeting guide sequence portion
cuucaaagccgugaucgugaa

SEQ ID NO: 5307 - RNA, 21 nt, Artificial Sequence
  LDLR targeting guide sequence portion
cuucacgaggaaaggaagaaa

SEQ ID NO: 5308 - RNA, 21 nt, Artificial Sequence
  LDLR targeting guide sequence portion
cuucacgcgggagucugacgg

SEQ ID NO: 5309 - RNA, 21 nt, Artificial Sequence
  LDLR targeting guide sequence portion
cuucagguucuuucugaaauc

SEQ ID NO: 5310 - RNA, 21 nt, Artificial Sequence
  LDLR targeting guide sequence portion
cuuccacuucuaugcaaaugc

SEQ ID NO: 5311 - RNA, 21 nt, Artificial Sequence
  LDLR targeting guide sequence portion
cuuccauguuugaggauugug

SEQ ID NO: 5312 - RNA, 21 nt, Artificial Sequence
  LDLR targeting guide sequence portion
cuuccauucccguggucuccu

SEQ ID NO: 5313 - RNA, 21 nt, Artificial Sequence
  LDLR targeting guide sequence portion
cuucccagaggcagagccuga

SEQ ID NO: 5314 - RNA, 21 nt, Artificial Sequence
  LDLR targeting guide sequence portion
cuuccccaaucuugucguuga

SEQ ID NO: 5315 - RNA, 21 nt, Artificial Sequence
  LDLR targeting guide sequence portion
cuuccugagaccucgccggcc

SEQ ID NO: 5316 - RNA, 21 nt, Artificial Sequence
  LDLR targeting guide sequence portion
cuuccuggagagaaauggagg

SEQ ID NO: 5317 - RNA, 21 nt, Artificial Sequence
  LDLR targeting guide sequence portion
cuuccuuaagccaggaaaggg

SEQ ID NO: 5318 - RNA, 21 nt, Artificial Sequence
  LDLR targeting guide sequence portion
cuuccuuuccucgugaaggau

SEQ ID NO: 5319 - RNA, 21 nt, Artificial Sequence
  LDLR targeting guide sequence portion
cuucggacagugcccaugcaa

SEQ ID NO: 5320 - RNA, 21 nt, Artificial Sequence
  LDLR targeting guide sequence portion
cuucuauacagugguuuaaaa

SEQ ID NO: 5321 - RNA, 21 nt, Artificial Sequence
  LDLR targeting guide sequence portion
cuucuaugcaaaugccuccaa

SEQ ID NO: 5322 - RNA, 21 nt, Artificial Sequence
  LDLR targeting guide sequence portion
cuucuaugcaagccuugcuag

SEQ ID NO: 5323 - RNA, 21 nt, Artificial Sequence
  LDLR targeting guide sequence portion
cuucucugggccugacauccc

SEQ ID NO: 5324 - RNA, 21 nt, Artificial Sequence
  LDLR targeting guide sequence portion
cuucucugucuuugaauaaaa

SEQ ID NO: 5325 - RNA, 21 nt, Artificial Sequence
  LDLR targeting guide sequence portion
cuucugggagaugggugucac

SEQ ID NO: 5326 - RNA, 21 nt, Artificial Sequence
  LDLR targeting guide sequence portion
cuugcacuuucucaguucaga

SEQ ID NO: 5327 - RNA, 21 nt, Artificial Sequence
  LDLR targeting guide sequence portion
cuugcauagaagagguaaaca

SEQ ID NO: 5328 - RNA, 21 nt, Artificial Sequence
  LDLR targeting guide sequence portion
cuugcuagacagccagguuag

SEQ ID NO: 5329 - RNA, 21 nt, Artificial Sequence
  LDLR targeting guide sequence portion
cuugcuucucugggccugaca

SEQ ID NO: 5330 - RNA, 21 nt, Artificial Sequence
  LDLR targeting guide sequence portion
cuuggaggcauuugcauagaa

SEQ ID NO: 5331 - RNA, 21 nt, Artificial Sequence
  LDLR targeting guide sequence portion
cuuggccgugaggacacgugg

SEQ ID NO: 5332 - RNA, 21 nt, Artificial Sequence
  LDLR targeting guide sequence portion
cuuggguugggauuuugguuu

SEQ ID NO: 5333 - RNA, 21 nt, Artificial Sequence
  LDLR targeting guide sequence portion
cuugucguugauggguaugug

SEQ ID NO: 5334 - RNA, 21 nt, Artificial Sequence
  LDLR targeting guide sequence portion
cuugugacaucuucacgcggg

SEQ ID NO: 5335 - RNA, 21 nt, Artificial Sequence
  LDLR targeting guide sequence portion
cuuguuuuauucaaagacaga

SEQ ID NO: 5336 - RNA, 21 nt, Artificial Sequence
  LDLR targeting guide sequence portion
cuuuauguccgcccaccuagu

SEQ ID NO: 5337 - RNA, 21 nt, Artificial Sequence
  LDLR targeting guide sequence portion
cuuucaucuuccauguuugag

SEQ ID NO: 5338 - RNA, 21 nt, Artificial Sequence
  LDLR targeting guide sequence portion
cuuucccuggccugggauccc

SEQ ID NO: 5339 - RNA, 21 nt, Artificial Sequence
  LDLR targeting guide sequence portion
cuuuccucgugaaggauaaga

SEQ ID NO: 5340 - RNA, 21 nt, Artificial Sequence
  LDLR targeting guide sequence portion
cuuuccuggcuuaaggaaggu

SEQ ID NO: 5341 - RNA, 21 nt, Artificial Sequence
  LDLR targeting guide sequence portion
cuuucgagguggguuuguacc

SEQ ID NO: 5342 - RNA, 21 nt, Artificial Sequence
  LDLR targeting guide sequence portion
cuuucucaguucagaguugua

SEQ ID NO: 5343 - RNA, 21 nt, Artificial Sequence
  LDLR targeting guide sequence portion
cuuucugaaaucgccguguua

SEQ ID NO: 5344 - RNA, 21 nt, Artificial Sequence
  LDLR targeting guide sequence portion
cuuucugguuucggagcacgu

SEQ ID NO: 5345 - RNA, 21 nt, Artificial Sequence
  LDLR targeting guide sequence portion
cuuugaagucccggucaaccu

SEQ ID NO: 5346 - RNA, 21 nt, Artificial Sequence
  LDLR targeting guide sequence portion
cuuugaauaaaacaaggccgg

SEQ ID NO: 5347 - RNA, 21 nt, Artificial Sequence
  LDLR targeting guide sequence portion
cuuugcccugucacccccgaa

SEQ ID NO: 5348 - RNA, 21 nt, Artificial Sequence
  LDLR targeting guide sequence portion
cuuugggaggcugagcuggau

SEQ ID NO: 5349 - RNA, 21 nt, Artificial Sequence
  LDLR targeting guide sequence portion
cuuuggucuucucugucuuug

SEQ ID NO: 5350 - RNA, 21 nt, Artificial Sequence
  LDLR targeting guide sequence portion
cuuuguacauaaagaagaggc

SEQ ID NO: 5351 - RNA, 21 nt, Artificial Sequence
  LDLR targeting guide sequence portion
cuuuguugcucaggccugguc

SEQ ID NO: 5352 - RNA, 21 nt, Artificial Sequence
  LDLR targeting guide sequence portion
cuuuuugggagaaugaugucc

SEQ ID NO: 5353 - RNA, 21 nt, Artificial Sequence
  LDLR targeting guide sequence portion
cuuuuugguuuuuguagagau

SEQ ID NO: 5354 - RNA, 21 nt, Artificial Sequence
  LDLR targeting guide sequence portion
gaaacaggcccggggggacca

SEQ ID NO: 5355 - RNA, 21 nt, Artificial Sequence
  LDLR targeting guide sequence portion
gaaaccaaaaucccaacccaa

SEQ ID NO: 5356 - RNA, 21 nt, Artificial Sequence
  LDLR targeting guide sequence portion
gaaaccagaaaggcuuaucac

SEQ ID NO: 5357 - RNA, 21 nt, Artificial Sequence
  LDLR targeting guide sequence portion
gaaacucaaaacuuccuggag

SEQ ID NO: 5358 - RNA, 21 nt, Artificial Sequence
  LDLR targeting guide sequence portion
gaaagaaccugaagucccguc

SEQ ID NO: 5359 - RNA, 21 nt, Artificial Sequence
  LDLR targeting guide sequence portion
gaaagacacugggugggucau

SEQ ID NO: 5360 - RNA, 21 nt, Artificial Sequence
  LDLR targeting guide sequence portion
gaaagcaguggcauaaucaua

SEQ ID NO: 5361 - RNA, 21 nt, Artificial Sequence
  LDLR targeting guide sequence portion
gaaagccacuugcuucucugg

SEQ ID NO: 5362 - RNA, 21 nt, Artificial Sequence
  LDLR targeting guide sequence portion
gaaagcccgugucaaugaaug

SEQ ID NO: 5363 - RNA, 21 nt, Artificial Sequence
  LDLR targeting guide sequence portion
gaaaggaagaaaccaaaaucc

SEQ ID NO: 5364 - RNA, 21 nt, Artificial Sequence
  LDLR targeting guide sequence portion
gaaaggcuuaucacgguuccc

SEQ ID NO: 5365 - RNA, 21 nt, Artificial Sequence
  LDLR targeting guide sequence portion
gaaagggauucauggcgucgg

SEQ ID NO: 5366 - RNA, 21 nt, Artificial Sequence
  LDLR targeting guide sequence portion
gaaaggggaggggaugucagg

SEQ ID NO: 5367 - RNA, 21 nt, Artificial Sequence
  LDLR targeting guide sequence portion
gaaagugcaaggagaccacgg

SEQ ID NO: 5368 - RNA, 21 nt, Artificial Sequence
  LDLR targeting guide sequence portion
gaaaucgccguguuacuguug

SEQ ID NO: 5369 - RNA, 21 nt, Artificial Sequence
  LDLR targeting guide sequence portion
gaaaugaucuggcugaauccg

SEQ ID NO: 5370 - RNA, 21 nt, Artificial Sequence
  LDLR targeting guide sequence portion
gaaaugccucuucuuuaugua

SEQ ID NO: 5371 - RNA, 21 nt, Artificial Sequence
  LDLR targeting guide sequence portion
gaaauggaggugucauccugg

SEQ ID NO: 5372 - RNA, 21 nt, Artificial Sequence
  LDLR targeting guide sequence portion
gaacaaauacagcaaccaggg

SEQ ID NO: 5373 - RNA, 21 nt, Artificial Sequence
  LDLR targeting guide sequence portion
gaacaggcuucggacagugcc

SEQ ID NO: 5374 - RNA, 21 nt, Artificial Sequence
  LDLR targeting guide sequence portion
gaacaucugccuggagucccg

SEQ ID NO: 5375 - RNA, 21 nt, Artificial Sequence
  LDLR targeting guide sequence portion
gaacccuuccugagaccucgc

SEQ ID NO: 5376 - RNA, 21 nt, Artificial Sequence
  LDLR targeting guide sequence portion
gaaccgugauaagccuuucug

SEQ ID NO: 5377 - RNA, 21 nt, Artificial Sequence
  LDLR targeting guide sequence portion
gaaccugaagucccgucaaac

SEQ ID NO: 5378 - RNA, 21 nt, Artificial Sequence
  LDLR targeting guide sequence portion
gaacucaagugauccagcuca

SEQ ID NO: 5379 - RNA, 21 nt, Artificial Sequence
  LDLR targeting guide sequence portion
gaacugagaaagugcaaggag

SEQ ID NO: 5380 - RNA, 21 nt, Artificial Sequence
  LDLR targeting guide sequence portion
gaacugccauugucgucuuua

SEQ ID NO: 5381 - RNA, 21 nt, Artificial Sequence
  LDLR targeting guide sequence portion
gaacuggacugugugcaacgc

SEQ ID NO: 5382 - RNA, 21 nt, Artificial Sequence
  LDLR targeting guide sequence portion
gaagaaaccaaaaucccaacc

SEQ ID NO: 5383 - RNA, 21 nt, Artificial Sequence
  LDLR targeting guide sequence portion
gaagaccaaagcauugccugc

SEQ ID NO: 5384 - RNA, 21 nt, Artificial Sequence
  LDLR targeting guide sequence portion
gaagacccuauuucagaaaua

SEQ ID NO: 5385 - RNA, 21 nt, Artificial Sequence
  LDLR targeting guide sequence portion
gaagaggcauuucagaggcaa

SEQ ID NO: 5386 - RNA, 21 nt, Artificial Sequence
  LDLR targeting guide sequence portion
gaagagguaaacacguugacu

SEQ ID NO: 5387 - RNA, 21 nt, Artificial Sequence
  LDLR targeting guide sequence portion
gaagaugaaaggggaggggau

SEQ ID NO: 5388 - RNA, 21 nt, Artificial Sequence
  LDLR targeting guide sequence portion
gaagaugucacaagggauugg

SEQ ID NO: 5389 - RNA, 21 nt, Artificial Sequence
  LDLR targeting guide sequence portion
gaagcaaguggcuuucaacac

SEQ ID NO: 5390 - RNA, 21 nt, Artificial Sequence
  LDLR targeting guide sequence portion
gaagcacuaggugggcggaca

SEQ ID NO: 5391 - RNA, 21 nt, Artificial Sequence
  LDLR targeting guide sequence portion
gaagccacucauacauacaac

SEQ ID NO: 5392 - RNA, 21 nt, Artificial Sequence
  LDLR targeting guide sequence portion
gaagccuguucugccucccag

SEQ ID NO: 5393 - RNA, 21 nt, Artificial Sequence
  LDLR targeting guide sequence portion
gaaggauaagagaaacaggcc

SEQ ID NO: 5394 - RNA, 21 nt, Artificial Sequence
  LDLR targeting guide sequence portion
gaaggguucugggcagggacg

SEQ ID NO: 5395 - RNA, 21 nt, Artificial Sequence
  LDLR targeting guide sequence portion
gaagguacaaacccaccucga

SEQ ID NO: 5396 - RNA, 21 nt, Artificial Sequence
  LDLR targeting guide sequence portion
gaagguuuuuguagccugaau

SEQ ID NO: 5397 - RNA, 21 nt, Artificial Sequence
  LDLR targeting guide sequence portion
gaagucccggucaaccugccc

SEQ ID NO: 5398 - RNA, 21 nt, Artificial Sequence
  LDLR targeting guide sequence portion
gaagucccgucaaacgaucca

SEQ ID NO: 5399 - RNA, 21 nt, Artificial Sequence
  LDLR targeting guide sequence portion
gaagugaauggcuuggaggca

SEQ ID NO: 5400 - RNA, 21 nt, Artificial Sequence
  LDLR targeting guide sequence portion
gaaguggaagcacuagguggg

SEQ ID NO: 5401 - RNA, 21 nt, Artificial Sequence
  LDLR targeting guide sequence portion
gaaguggcaucauuuggugaa

SEQ ID NO: 5402 - RNA, 21 nt, Artificial Sequence
  LDLR targeting guide sequence portion
gaaguggguaggggucgggag

SEQ ID NO: 5403 - RNA, 21 nt, Artificial Sequence
  LDLR targeting guide sequence portion
gaaguuuugaguuucucucca

SEQ ID NO: 5404 - RNA, 21 nt, Artificial Sequence
  LDLR targeting guide sequence portion
gaauaaaacaaggccggcgag

SEQ ID NO: 5405 - RNA, 21 nt, Artificial Sequence
  LDLR targeting guide sequence portion
gaauagucacugaacaaauac

SEQ ID NO: 5406 - RNA, 21 nt, Artificial Sequence
  LDLR targeting guide sequence portion
gaauaucgagaacugccauug

SEQ ID NO: 5407 - RNA, 21 nt, Artificial Sequence
  LDLR targeting guide sequence portion
gaaucaugacccacccagugu

SEQ ID NO: 5408 - RNA, 21 nt, Artificial Sequence
  LDLR targeting guide sequence portion
gaaucccuuuccuggcuuaag

SEQ ID NO: 5409 - RNA, 21 nt, Artificial Sequence
  LDLR targeting guide sequence portion
gaauccgugguggcaccgaga

SEQ ID NO: 5410 - RNA, 21 nt, Artificial Sequence
  LDLR targeting guide sequence portion
gaaugaguuuggucucggugc

SEQ ID NO: 5411 - RNA, 21 nt, Artificial Sequence
  LDLR targeting guide sequence portion
gaaugauguccccguuguaug

SEQ ID NO: 5412 - RNA, 21 nt, Artificial Sequence
  LDLR targeting guide sequence portion
gaaugccggggacagagaggg

SEQ ID NO: 5413 - RNA, 21 nt, Artificial Sequence
  LDLR targeting guide sequence portion
gaauggaaguggguagggguc

SEQ ID NO: 5414 - RNA, 21 nt, Artificial Sequence
  LDLR targeting guide sequence portion
gaauggcuuggaggcauuugc

SEQ ID NO: 5415 - RNA, 21 nt, Artificial Sequence
  LDLR targeting guide sequence portion
gaauuuggccagacacaggug

SEQ ID NO: 5416 - RNA, 21 nt, Artificial Sequence
  LDLR targeting guide sequence portion
gacaagauuggggaagugaau

SEQ ID NO: 5417 - RNA, 21 nt, Artificial Sequence
  LDLR targeting guide sequence portion
gacaauggcaguucucgauau

SEQ ID NO: 5418 - RNA, 21 nt, Artificial Sequence
  LDLR targeting guide sequence portion
gacaauugccaaucccuugug

SEQ ID NO: 5419 - RNA, 21 nt, Artificial Sequence
  LDLR targeting guide sequence portion
gacacaauccucaaacaugga

SEQ ID NO: 5420 - RNA, 21 nt, Artificial Sequence
  LDLR targeting guide sequence portion
gacacaggugccucacgccug

SEQ ID NO: 5421 - RNA, 21 nt, Artificial Sequence
  LDLR targeting guide sequence portion
gacacaguguuuugucccugg

SEQ ID NO: 5422 - RNA, 21 nt, Artificial Sequence
  LDLR targeting guide sequence portion
gacaccagccuggugcccauc

SEQ ID NO: 5423 - RNA, 21 nt, Artificial Sequence
  LDLR targeting guide sequence portion
gacacccaucucccagaagcc

SEQ ID NO: 5424 - RNA, 21 nt, Artificial Sequence
  LDLR targeting guide sequence portion
gacacccgguuaccuuggccg

SEQ ID NO: 5425 - RNA, 21 nt, Artificial Sequence
  LDLR targeting guide sequence portion
gacaccuccauuucucuccag

SEQ ID NO: 5426 - RNA, 21 nt, Artificial Sequence
  LDLR targeting guide sequence portion
gacacgggcuuucccuggccu

SEQ ID NO: 5427 - RNA, 21 nt, Artificial Sequence
  LDLR targeting guide sequence portion
gacacguggccugcacccagg

SEQ ID NO: 5428 - RNA, 21 nt, Artificial Sequence
  LDLR targeting guide sequence portion
gacacugggugggucaugauu

SEQ ID NO: 5429 - RNA, 21 nt, Artificial Sequence
  LDLR targeting guide sequence portion
gacagagaagaccaaagcauu

SEQ ID NO: 5430 - RNA, 21 nt, Artificial Sequence
  LDLR targeting guide sequence portion
gacagagaggggcagguugac

SEQ ID NO: 5431 - RNA, 21 nt, Artificial Sequence
  LDLR targeting guide sequence portion
gacagauggucagucuggagg

SEQ ID NO: 5432 - RNA, 21 nt, Artificial Sequence
  LDLR targeting guide sequence portion
gacagccacaccugggugcag

SEQ ID NO: 5433 - RNA, 21 nt, Artificial Sequence
  LDLR targeting guide sequence portion
gacagccagguuagccuuugc

SEQ ID NO: 5434 - RNA, 21 nt, Artificial Sequence
  LDLR targeting guide sequence portion
gacagccucaaaugccugagc

SEQ ID NO: 5435 - RNA, 21 nt, Artificial Sequence
  LDLR targeting guide sequence portion
gacagccuccgucagacuccc

SEQ ID NO: 5436 - RNA, 21 nt, Artificial Sequence
  LDLR targeting guide sequence portion
gacagggcaaaggcuaaccug

SEQ ID NO: 5437 - RNA, 21 nt, Artificial Sequence
  LDLR targeting guide sequence portion
gacagugacagccuccgucag

SEQ ID NO: 5438 - RNA, 21 nt, Artificial Sequence
  LDLR targeting guide sequence portion
gacagugcccaugcaauggcu

SEQ ID NO: 5439 - RNA, 21 nt, Artificial Sequence
  LDLR targeting guide sequence portion
gacauaaagacgacaauggca

SEQ ID NO: 5440 - RNA, 21 nt, Artificial Sequence
  LDLR targeting guide sequence portion
gacaucagugcaacaguaaca

SEQ ID NO: 5441 - RNA, 21 nt, Artificial Sequence
  LDLR targeting guide sequence portion
gacaucauucucccaaaaagc

SEQ ID NO: 5442 - RNA, 21 nt, Artificial Sequence
  LDLR targeting guide sequence portion
gacauccccuccccuuucauc

SEQ ID NO: 5443 - RNA, 21 nt, Artificial Sequence
  LDLR targeting guide sequence portion
gacaucuucacgcgggagucu

SEQ ID NO: 5444 - RNA, 21 nt, Artificial Sequence
  LDLR targeting guide sequence portion
gacauucaggcuacaaaaacc

SEQ ID NO: 5445 - RNA, 21 nt, Artificial Sequence
  LDLR targeting guide sequence portion
gaccaaacucauucaccaaau

SEQ ID NO: 5446 - RNA, 21 nt, Artificial Sequence
  LDLR targeting guide sequence portion
gaccaaagcauugccugccag

SEQ ID NO: 5447 - RNA, 21 nt, Artificial Sequence
  LDLR targeting guide sequence portion
gaccacgggaauggaaguggg

SEQ ID NO: 5448 - RNA, 21 nt, Artificial Sequence
  LDLR targeting guide sequence portion
gaccaggaugacaccuccauu

SEQ ID NO: 5449 - RNA, 21 nt, Artificial Sequence
  LDLR targeting guide sequence portion
gaccaggccugagcaacaaag

SEQ ID NO: 5450 - RNA, 21 nt, Artificial Sequence
  LDLR targeting guide sequence portion
gaccagugacucaggcucugc

SEQ ID NO: 5451 - RNA, 21 nt, Artificial Sequence
  LDLR targeting guide sequence portion
gacccacccagugucuuucga

SEQ ID NO: 5452 - RNA, 21 nt, Artificial Sequence
  LDLR targeting guide sequence portion
gaccccaucucuuaaaaaaug

SEQ ID NO: 5453 - RNA, 21 nt, Artificial Sequence
  LDLR targeting guide sequence portion
gacccccuggcccugccucau

SEQ ID NO: 5454 - RNA, 21 nt, Artificial Sequence
  LDLR targeting guide sequence portion
gaccccuacccacuuccauuc

SEQ ID NO: 5455 - RNA, 21 nt, Artificial Sequence
  LDLR targeting guide sequence portion
gaccgggacuucaaagccgug

SEQ ID NO: 5456 - RNA, 21 nt, Artificial Sequence
  LDLR targeting guide sequence portion
gaccucgccggccuuguuuua

SEQ ID NO: 5457 - RNA, 21 nt, Artificial Sequence
  LDLR targeting guide sequence portion
gacgacaauggcaguucucga

SEQ ID NO: 5458 - RNA, 21 nt, Artificial Sequence
  LDLR targeting guide sequence portion
gacgcauuuacgugcuccgaa

SEQ ID NO: 5459 - RNA, 21 nt, Artificial Sequence
  LDLR targeting guide sequence portion
gacgccaugaaucccuuuccu

SEQ ID NO: 5460 - RNA, 21 nt, Artificial Sequence
  LDLR targeting guide sequence portion
gacggaggcugucacugucuc

SEQ ID NO: 5461 - RNA, 21 nt, Artificial Sequence
  LDLR targeting guide sequence portion
gacgggacuccaggcagaugu

SEQ ID NO: 5462 - RNA, 21 nt, Artificial Sequence
  LDLR targeting guide sequence portion
gacgggacuucagguucuuuc

SEQ ID NO: 5463 - RNA, 21 nt, Artificial Sequence
  LDLR targeting guide sequence portion
gacguggcgugaacaucugcc

SEQ ID NO: 5464 - RNA, 21 nt, Artificial Sequence
  LDLR targeting guide sequence portion
gacuauucucggggcccugug

SEQ ID NO: 5465 - RNA, 21 nt, Artificial Sequence
  LDLR targeting guide sequence portion
gacucaggcucugccucuggg

SEQ ID NO: 5466 - RNA, 21 nt, Artificial Sequence
  LDLR targeting guide sequence portion
gacuccaggcagauguucacg

SEQ ID NO: 5467 - RNA, 21 nt, Artificial Sequence
  LDLR targeting guide sequence portion
gacucccgcgugaagauguca

SEQ ID NO: 5468 - RNA, 21 nt, Artificial Sequence
  LDLR targeting guide sequence portion
gacuccugaguuuagggguuu

SEQ ID NO: 5469 - RNA, 21 nt, Artificial Sequence
  LDLR targeting guide sequence portion
gacugugugcaacgcuuuuug

SEQ ID NO: 5470 - RNA, 21 nt, Artificial Sequence
  LDLR targeting guide sequence portion
gacuucaaagccgugaucgug

SEQ ID NO: 5471 - RNA, 21 nt, Artificial Sequence
  LDLR targeting guide sequence portion
gacuucagguucuuucugaaa

SEQ ID NO: 5472 - RNA, 21 nt, Artificial Sequence
  LDLR targeting guide sequence portion
gagaaacaggcccggggggac

SEQ ID NO: 5473 - RNA, 21 nt, Artificial Sequence
  LDLR targeting guide sequence portion
gagaaacucaaaacuuccugg

SEQ ID NO: 5474 - RNA, 21 nt, Artificial Sequence
  LDLR targeting guide sequence portion
gagaaagugcaaggagaccac

SEQ ID NO: 5475 - RNA, 21 nt, Artificial Sequence
  LDLR targeting guide sequence portion
gagaaauggaggugucauccu

SEQ ID NO: 5476 - RNA, 21 nt, Artificial Sequence
  LDLR targeting guide sequence portion
gagaacugccauugucgucuu

SEQ ID NO: 5477 - RNA, 21 nt, Artificial Sequence
  LDLR targeting guide sequence portion
gagaagaccaaagcauugccu

SEQ ID NO: 5478 - RNA, 21 nt, Artificial Sequence
  LDLR targeting guide sequence portion
gagaagcaaguggcuuucaac

SEQ ID NO: 5479 - RNA, 21 nt, Artificial Sequence
  LDLR targeting guide sequence portion
gagaauagucacugaacaaau

SEQ ID NO: 5480 - RNA, 21 nt, Artificial Sequence
  LDLR targeting guide sequence portion
gagaaugauguccccguugua

SEQ ID NO: 5481 - RNA, 21 nt, Artificial Sequence
  LDLR targeting guide sequence portion
gagacacccgguuaccuuggc

SEQ ID NO: 5482 - RNA, 21 nt, Artificial Sequence
  LDLR targeting guide sequence portion
gagacagauggucagucugga

SEQ ID NO: 5483 - RNA, 21 nt, Artificial Sequence
  LDLR targeting guide sequence portion
gagacagugacagccuccguc

SEQ ID NO: 5484 - RNA, 21 nt, Artificial Sequence
  LDLR targeting guide sequence portion
gagaccaaacucauucaccaa

SEQ ID NO: 5485 - RNA, 21 nt, Artificial Sequence
  LDLR targeting guide sequence portion
gagaccacgggaauggaagug

SEQ ID NO: 5486 - RNA, 21 nt, Artificial Sequence
  LDLR targeting guide sequence portion
gagaccaggccugagcaacaa

SEQ ID NO: 5487 - RNA, 21 nt, Artificial Sequence
  LDLR targeting guide sequence portion
gagaccucgccggccuuguuu

SEQ ID NO: 5488 - RNA, 21 nt, Artificial Sequence
  LDLR targeting guide sequence portion
gagagaaacucaaaacuuccu

SEQ ID NO: 5489 - RNA, 21 nt, Artificial Sequence
  LDLR targeting guide sequence portion
gagagaaauggaggugucauc

SEQ ID NO: 5490 - RNA, 21 nt, Artificial Sequence
  LDLR targeting guide sequence portion
gagagacagugacagccuccg

SEQ ID NO: 5491 - RNA, 21 nt, Artificial Sequence
  LDLR targeting guide sequence portion
gagaggggcagguugaccggg

SEQ ID NO: 5492 - RNA, 21 nt, Artificial Sequence
  LDLR targeting guide sequence portion
gagaucccaucucuacaaaaa

SEQ ID NO: 5493 - RNA, 21 nt, Artificial Sequence
  LDLR targeting guide sequence portion
gagaugggaucucgcuuuguu

SEQ ID NO: 5494 - RNA, 21 nt, Artificial Sequence
  LDLR targeting guide sequence portion
gagaugggugucacuuuuuaa

SEQ ID NO: 5495 - RNA, 21 nt, Artificial Sequence
  LDLR targeting guide sequence portion
gagauugguggaugaggcagg

SEQ ID NO: 5496 - RNA, 21 nt, Artificial Sequence
  LDLR targeting guide sequence portion
gagcaacaaagcgagauccca

SEQ ID NO: 5497 - RNA, 21 nt, Artificial Sequence
  LDLR targeting guide sequence portion
gagcacguaaaugcgucccug

SEQ ID NO: 5498 - RNA, 21 nt, Artificial Sequence
  LDLR targeting guide sequence portion
gagccacugcgcccggccuca

SEQ ID NO: 5499 - RNA, 21 nt, Artificial Sequence
  LDLR targeting guide sequence portion
gagccugagucacuggucacc

SEQ ID NO: 5500 - RNA, 21 nt, Artificial Sequence
  LDLR targeting guide sequence portion
gagcuaugauuaugccacugc

SEQ ID NO: 5501 - RNA, 21 nt, Artificial Sequence
  LDLR targeting guide sequence portion
gagcucaggcauuugaggcug

SEQ ID NO: 5502 - RNA, 21 nt, Artificial Sequence
  LDLR targeting guide sequence portion
gaggaaaggaagaaaccaaaa

SEQ ID NO: 5503 - RNA, 21 nt, Artificial Sequence
  LDLR targeting guide sequence portion
gaggacacguggccugcaccc

SEQ ID NO: 5504 - RNA, 21 nt, Artificial Sequence
  LDLR targeting guide sequence portion
gaggaugacguggcgugaaca

SEQ ID NO: 5505 - RNA, 21 nt, Artificial Sequence
  LDLR targeting guide sequence portion
gaggaugggcaccaggcuggu

SEQ ID NO: 5506 - RNA, 21 nt, Artificial Sequence
  LDLR targeting guide sequence portion
gaggaugguuugagcucaggc

SEQ ID NO: 5507 - RNA, 21 nt, Artificial Sequence
  LDLR targeting guide sequence portion
gaggauugugucacgguggag

SEQ ID NO: 5508 - RNA, 21 nt, Artificial Sequence
  LDLR targeting guide sequence portion
gaggcaauaacccccuacaca

SEQ ID NO: 5509 - RNA, 21 nt, Artificial Sequence
  LDLR targeting guide sequence portion
gaggcaccugugucuggccaa

SEQ ID NO: 5510 - RNA, 21 nt, Artificial Sequence
  LDLR targeting guide sequence portion
gaggcagaacaggcuucggac

SEQ ID NO: 5511 - RNA, 21 nt, Artificial Sequence
  LDLR targeting guide sequence portion
gaggcagagccugagucacug

SEQ ID NO: 5512 - RNA, 21 nt, Artificial Sequence
  LDLR targeting guide sequence portion
gaggcagggccaggggguccc

SEQ ID NO: 5513 - RNA, 21 nt, Artificial Sequence
  LDLR targeting guide sequence portion
gaggcauuucagaggcaauaa

SEQ ID NO: 5514 - RNA, 21 nt, Artificial Sequence
  LDLR targeting guide sequence portion
gaggcauuugcauagaagugg

SEQ ID NO: 5515 - RNA, 21 nt, Artificial Sequence
  LDLR targeting guide sequence portion
gaggccaugggcugcugaugc

SEQ ID NO: 5516 - RNA, 21 nt, Artificial Sequence
  LDLR targeting guide sequence portion
gaggcugagcuggaucacuug

SEQ ID NO: 5517 - RNA, 21 nt, Artificial Sequence
  LDLR targeting guide sequence portion
gaggcugucacugucucuccg

SEQ ID NO: 5518 - RNA, 21 nt, Artificial Sequence
  LDLR targeting guide sequence portion
gaggggaugucaggcccagag

SEQ ID NO: 5519 - RNA, 21 nt, Artificial Sequence
  LDLR targeting guide sequence portion
gaggggcagguugaccgggac

SEQ ID NO: 5520 - RNA, 21 nt, Artificial Sequence
  LDLR targeting guide sequence portion
gagguaaacacguugacuccu

SEQ ID NO: 5521 - RNA, 21 nt, Artificial Sequence
  LDLR targeting guide sequence portion
gaggucucaggaaggguucug

SEQ ID NO: 5522 - RNA, 21 nt, Artificial Sequence
  LDLR targeting guide sequence portion
gagguggguuuguaccuuccu

SEQ ID NO: 5523 - RNA, 21 nt, Artificial Sequence
  LDLR targeting guide sequence portion
gaggugucauccugguccccc

SEQ ID NO: 5524 - RNA, 21 nt, Artificial Sequence
  LDLR targeting guide sequence portion
gagucaacguguuuaccucuu

SEQ ID NO: 5525 - RNA, 21 nt, Artificial Sequence
  LDLR targeting guide sequence portion
gagucacuggucacccuuaau

SEQ ID NO: 5526 - RNA, 21 nt, Artificial Sequence
  LDLR targeting guide sequence portion
gagucccgucccugcccagaa

SEQ ID NO: 5527 - RNA, 21 nt, Artificial Sequence
  LDLR targeting guide sequence portion
gagucugacggaggcugucac

SEQ ID NO: 5528 - RNA, 21 nt, Artificial Sequence
  LDLR targeting guide sequence portion
gaguggcuucugggagauggg

SEQ ID NO: 5529 - RNA, 21 nt, Artificial Sequence
  LDLR targeting guide sequence portion
gaguucaggaguuggagacca

SEQ ID NO: 5530 - RNA, 21 nt, Artificial Sequence
  LDLR targeting guide sequence portion
gaguuggagaccaggccugag

SEQ ID NO: 5531 - RNA, 21 nt, Artificial Sequence
  LDLR targeting guide sequence portion
gaguuguacacuguguacauu

SEQ ID NO: 5532 - RNA, 21 nt, Artificial Sequence
  LDLR targeting guide sequence portion
gaguuuagggguuuggcuuag

SEQ ID NO: 5533 - RNA, 21 nt, Artificial Sequence
  LDLR targeting guide sequence portion
gaguuucucuccaccgugaca

SEQ ID NO: 5534 - RNA, 21 nt, Artificial Sequence
  LDLR targeting guide sequence portion
gaguuuggucucggugccacc

SEQ ID NO: 5535 - RNA, 21 nt, Artificial Sequence
  LDLR targeting guide sequence portion
gauaagagaaacaggcccggg

SEQ ID NO: 5536 - RNA, 21 nt, Artificial Sequence
  LDLR targeting guide sequence portion
gauaagccuuucugguuucgg

SEQ ID NO: 5537 - RNA, 21 nt, Artificial Sequence
  LDLR targeting guide sequence portion
gauaguggggauuuuuuguua

SEQ ID NO: 5538 - RNA, 21 nt, Artificial Sequence
  LDLR targeting guide sequence portion
gauauucacgaucacggcuuu

SEQ ID NO: 5539 - RNA, 21 nt, Artificial Sequence
  LDLR targeting guide sequence portion
gaucacaggcacgugccaccg

SEQ ID NO: 5540 - RNA, 21 nt, Artificial Sequence
  LDLR targeting guide sequence portion
gaucacaguaagacauucagg

SEQ ID NO: 5541 - RNA, 21 nt, Artificial Sequence
  LDLR targeting guide sequence portion
gaucacggcuuugaagucccg

SEQ ID NO: 5542 - RNA, 21 nt, Artificial Sequence
  LDLR targeting guide sequence portion
gaucauuuccgacgccaugaa

SEQ ID NO: 5543 - RNA, 21 nt, Artificial Sequence
  LDLR targeting guide sequence portion
gauccagacuggaggauuuau

SEQ ID NO: 5544 - RNA, 21 nt, Artificial Sequence
  LDLR targeting guide sequence portion
gauccagcucagccucccaaa

SEQ ID NO: 5545 - RNA, 21 nt, Artificial Sequence
  LDLR targeting guide sequence portion
gaucccaggccagggaaagcc

SEQ ID NO: 5546 - RNA, 21 nt, Artificial Sequence
  LDLR targeting guide sequence portion
gaucccaucccaacacacacg

SEQ ID NO: 5547 - RNA, 21 nt, Artificial Sequence
  LDLR targeting guide sequence portion
gaucccaucucuacaaaaacc

SEQ ID NO: 5548 - RNA, 21 nt, Artificial Sequence
  LDLR targeting guide sequence portion
gaucgugaauaucgagaacug

SEQ ID NO: 5549 - RNA, 21 nt, Artificial Sequence
  LDLR targeting guide sequence portion
gaucguuugacgggacuucag

SEQ ID NO: 5550 - RNA, 21 nt, Artificial Sequence
  LDLR targeting guide sequence portion
gaucucgcuuuguugcucagg

SEQ ID NO: 5551 - RNA, 21 nt, Artificial Sequence
  LDLR targeting guide sequence portion
gaucuggcugaauccguggug

SEQ ID NO: 5552 - RNA, 21 nt, Artificial Sequence
  LDLR targeting guide sequence portion
gaugaaaggggaggggauguc

SEQ ID NO: 5553 - RNA, 21 nt, Artificial Sequence
  LDLR targeting guide sequence portion
gaugaagacccuauuucagaa

SEQ ID NO: 5554 - RNA, 21 nt, Artificial Sequence
  LDLR targeting guide sequence portion
gaugacaccuccauuucucuc

SEQ ID NO: 5555 - RNA, 21 nt, Artificial Sequence
  LDLR targeting guide sequence portion
gaugacguggcgugaacaucu

SEQ ID NO: 5556 - RNA, 21 nt, Artificial Sequence
  LDLR targeting guide sequence portion
gaugaggcagggccagggggu

SEQ ID NO: 5557 - RNA, 21 nt, Artificial Sequence
  LDLR targeting guide sequence portion
gaugccacuucccagaggcag

SEQ ID NO: 5558 - RNA, 21 nt, Artificial Sequence
  LDLR targeting guide sequence portion
gauggcaccaacgggaccccc

SEQ ID NO: 5559 - RNA, 21 nt, Artificial Sequence
  LDLR targeting guide sequence portion
gaugggaucccaggccaggga

SEQ ID NO: 5560 - RNA, 21 nt, Artificial Sequence
  LDLR targeting guide sequence portion
gaugggaucucgcuuuguugc

SEQ ID NO: 5561 - RNA, 21 nt, Artificial Sequence
  LDLR targeting guide sequence portion
gaugggcaccaggcugguguc

SEQ ID NO: 5562 - RNA, 21 nt, Artificial Sequence
  LDLR targeting guide sequence portion
gauggguauguguuuaaaaca

SEQ ID NO: 5563 - RNA, 21 nt, Artificial Sequence
  LDLR targeting guide sequence portion
gaugggugucacuuuuuaaac

SEQ ID NO: 5564 - RNA, 21 nt, Artificial Sequence
  LDLR targeting guide sequence portion
gauggucagucuggaggauga

SEQ ID NO: 5565 - RNA, 21 nt, Artificial Sequence
  LDLR targeting guide sequence portion
gaugguuugagcucaggcauu

SEQ ID NO: 5566 - RNA, 21 nt, Artificial Sequence
  LDLR targeting guide sequence portion
gaugucacaagggauuggcaa

SEQ ID NO: 5567 - RNA, 21 nt, Artificial Sequence
  LDLR targeting guide sequence portion
gaugucaggcccagagaagca

SEQ ID NO: 5568 - RNA, 21 nt, Artificial Sequence
  LDLR targeting guide sequence portion
gauguccccguuguauguaug

SEQ ID NO: 5569 - RNA, 21 nt, Artificial Sequence
  LDLR targeting guide sequence portion
gauguccggagagacagugac

SEQ ID NO: 5570 - RNA, 21 nt, Artificial Sequence
  LDLR targeting guide sequence portion
gauguucacgccacgucaucc

SEQ ID NO: 5571 - RNA, 21 nt, Artificial Sequence
  LDLR targeting guide sequence portion
gauuacaggcgugaggcaccu

SEQ ID NO: 5572 - RNA, 21 nt, Artificial Sequence
  LDLR targeting guide sequence portion
gauuaugccacugcuuuccag

SEQ ID NO: 5573 - RNA, 21 nt, Artificial Sequence
  LDLR targeting guide sequence portion
gauuauuugcacgaacuggac

SEQ ID NO: 5574 - RNA, 21 nt, Artificial Sequence
  LDLR targeting guide sequence portion
gauucagccagaucauuuccg

SEQ ID NO: 5575 - RNA, 21 nt, Artificial Sequence
  LDLR targeting guide sequence portion
gauucauggcgucggaaauga

SEQ ID NO: 5576 - RNA, 21 nt, Artificial Sequence
  LDLR targeting guide sequence portion
gauucgggggugacagggcaa

SEQ ID NO: 5577 - RNA, 21 nt, Artificial Sequence
  LDLR targeting guide sequence portion
gauuggcaauuguccccaggg

SEQ ID NO: 5578 - RNA, 21 nt, Artificial Sequence
  LDLR targeting guide sequence portion
gauuggggaagugaauggcuu

SEQ ID NO: 5579 - RNA, 21 nt, Artificial Sequence
  LDLR targeting guide sequence portion
gauugguggaugaggcagggc

SEQ ID NO: 5580 - RNA, 21 nt, Artificial Sequence
  LDLR targeting guide sequence portion
gauugugucacgguggagaga

SEQ ID NO: 5581 - RNA, 21 nt, Artificial Sequence
  LDLR targeting guide sequence portion
gauuucagaaagaaccugaag

SEQ ID NO: 5582 - RNA, 21 nt, Artificial Sequence
  LDLR targeting guide sequence portion
gauuuugguuucuuccuuucc

SEQ ID NO: 5583 - RNA, 21 nt, Artificial Sequence
  LDLR targeting guide sequence portion
gcaaacauaacaaaaaauccc

SEQ ID NO: 5584 - RNA, 21 nt, Artificial Sequence
  LDLR targeting guide sequence portion
gcaaacccugguugcuguauu

SEQ ID NO: 5585 - RNA, 21 nt, Artificial Sequence
  LDLR targeting guide sequence portion
gcaaaggcuaaccuggcuguc

SEQ ID NO: 5586 - RNA, 21 nt, Artificial Sequence
  LDLR targeting guide sequence portion
gcaaaugccuccaagccauuc

SEQ ID NO: 5587 - RNA, 21 nt, Artificial Sequence
  LDLR targeting guide sequence portion
gcaacagaugaagacccuauu

SEQ ID NO: 5588 - RNA, 21 nt, Artificial Sequence
  LDLR targeting guide sequence portion
gcaacaguaacacggcgauuu

SEQ ID NO: 5589 - RNA, 21 nt, Artificial Sequence
  LDLR targeting guide sequence portion
gcaaccaggguuugcaaaaau

SEQ ID NO: 5590 - RNA, 21 nt, Artificial Sequence
  LDLR targeting guide sequence portion
gcaacgcuuuuugggagaaug

SEQ ID NO: 5591 - RNA, 21 nt, Artificial Sequence
  LDLR targeting guide sequence portion
gcaagccuugcuagacagcca

SEQ ID NO: 5592 - RNA, 21 nt, Artificial Sequence
  LDLR targeting guide sequence portion
gcaaggagaccacgggaaugg

SEQ ID NO: 5593 - RNA, 21 nt, Artificial Sequence
  LDLR targeting guide sequence portion
gcaaggcuugcauagaagagg

SEQ ID NO: 5594 - RNA, 21 nt, Artificial Sequence
  LDLR targeting guide sequence portion
gcaaguggcuuucaacacaca

SEQ ID NO: 5595 - RNA, 21 nt, Artificial Sequence
  LDLR targeting guide sequence portion
gcaauaacccccuacacaggg

SEQ ID NO: 5596 - RNA, 21 nt, Artificial Sequence
  LDLR targeting guide sequence portion
gcaaugcuuuggucuucucug

SEQ ID NO: 5597 - RNA, 21 nt, Artificial Sequence
  LDLR targeting guide sequence portion
gcaauggcuuggguugggauu

SEQ ID NO: 5598 - RNA, 21 nt, Artificial Sequence
  LDLR targeting guide sequence portion
gcaauuguccccagggacaaa

SEQ ID NO: 5599 - RNA, 21 nt, Artificial Sequence
  LDLR targeting guide sequence portion
gcacacaguccaguucgugca

SEQ ID NO: 5600 - RNA, 21 nt, Artificial Sequence
  LDLR targeting guide sequence portion
gcaccaacgggacccccuggc

SEQ ID NO: 5601 - RNA, 21 nt, Artificial Sequence
  LDLR targeting guide sequence portion
gcaccaggcugguguccugac

SEQ ID NO: 5602 - RNA, 21 nt, Artificial Sequence
  LDLR targeting guide sequence portion
gcacccagguguggcugucag

SEQ ID NO: 5603 - RNA, 21 nt, Artificial Sequence
  LDLR targeting guide sequence portion
gcaccgagaccaaacucauuc

SEQ ID NO: 5604 - RNA, 21 nt, Artificial Sequence
  LDLR targeting guide sequence portion
gcaccugugucuggccaaauu

SEQ ID NO: 5605 - RNA, 21 nt, Artificial Sequence
  LDLR targeting guide sequence portion
gcacgaacuggacugugugca

SEQ ID NO: 5606 - RNA, 21 nt, Artificial Sequence
  LDLR targeting guide sequence portion
gcacggugaggccgggcgcag

SEQ ID NO: 5607 - RNA, 21 nt, Artificial Sequence
  LDLR targeting guide sequence portion
gcacguaaaugcgucccugua

SEQ ID NO: 5608 - RNA, 21 nt, Artificial Sequence
  LDLR targeting guide sequence portion
gcacgugccaccguacccagc

SEQ ID NO: 5609 - RNA, 21 nt, Artificial Sequence
  LDLR targeting guide sequence portion
gcacuaggugggcggacauaa

SEQ ID NO: 5610 - RNA, 21 nt, Artificial Sequence
  LDLR targeting guide sequence portion
gcacugauguccggagagaca

SEQ ID NO: 5611 - RNA, 21 nt, Artificial Sequence
  LDLR targeting guide sequence portion
gcacuguccgaagccuguucu

SEQ ID NO: 5612 - RNA, 21 nt, Artificial Sequence
  LDLR targeting guide sequence portion
gcacuguuuucugucgugugu

SEQ ID NO: 5613 - RNA, 21 nt, Artificial Sequence
  LDLR targeting guide sequence portion
gcacuuaauaaauauuaaggg

SEQ ID NO: 5614 - RNA, 21 nt, Artificial Sequence
  LDLR targeting guide sequence portion
gcacuuucucaguucagaguu

SEQ ID NO: 5615 - RNA, 21 nt, Artificial Sequence
  LDLR targeting guide sequence portion
gcacuuugggaggcugagcug

SEQ ID NO: 5616 - RNA, 21 nt, Artificial Sequence
  LDLR targeting guide sequence portion
gcacuuuguauauugguugaa

SEQ ID NO: 5617 - RNA, 21 nt, Artificial Sequence
  LDLR targeting guide sequence portion
gcagaacaggcuucggacagu

SEQ ID NO: 5618 - RNA, 21 nt, Artificial Sequence
  LDLR targeting guide sequence portion
gcagagccugagucacugguc

SEQ ID NO: 5619 - RNA, 21 nt, Artificial Sequence
  LDLR targeting guide sequence portion
gcagauggcaccaacgggacc

SEQ ID NO: 5620 - RNA, 21 nt, Artificial Sequence
  LDLR targeting guide sequence portion
gcagauguucacgccacguca

SEQ ID NO: 5621 - RNA, 21 nt, Artificial Sequence
  LDLR targeting guide sequence portion
gcagcccauggccucuggcca

SEQ ID NO: 5622 - RNA, 21 nt, Artificial Sequence
  LDLR targeting guide sequence portion
gcaggcaaugcuuuggucuuc

SEQ ID NO: 5623 - RNA, 21 nt, Artificial Sequence
  LDLR targeting guide sequence portion
gcaggccacguguccucacgg

SEQ ID NO: 5624 - RNA, 21 nt, Artificial Sequence
  LDLR targeting guide sequence portion
gcagggaaccgugauaagccu

SEQ ID NO: 5625 - RNA, 21 nt, Artificial Sequence
  LDLR targeting guide sequence portion
gcagggacgggacuccaggca

SEQ ID NO: 5626 - RNA, 21 nt, Artificial Sequence
  LDLR targeting guide sequence portion
gcagggccagggggucccguu

SEQ ID NO: 5627 - RNA, 21 nt, Artificial Sequence
  LDLR targeting guide sequence portion
gcagguugaccgggacuucaa

SEQ ID NO: 5628 - RNA, 21 nt, Artificial Sequence
  LDLR targeting guide sequence portion
gcaguggcauaaucauagcuc

SEQ ID NO: 5629 - RNA, 21 nt, Artificial Sequence
  LDLR targeting guide sequence portion
gcaguucucgauauucacgau

SEQ ID NO: 5630 - RNA, 21 nt, Artificial Sequence
  LDLR targeting guide sequence portion
gcauaaucauagcucacgaca

SEQ ID NO: 5631 - RNA, 21 nt, Artificial Sequence
  LDLR targeting guide sequence portion
gcauagaagagguaaacacgu

SEQ ID NO: 5632 - RNA, 21 nt, Artificial Sequence
  LDLR targeting guide sequence portion
gcauagaaguggaagcacuag

SEQ ID NO: 5633 - RNA, 21 nt, Artificial Sequence
  LDLR targeting guide sequence portion
gcaucagcagcccauggccuc

SEQ ID NO: 5634 - RNA, 21 nt, Artificial Sequence
  LDLR targeting guide sequence portion
gcaucauuuggugaaugaguu

SEQ ID NO: 5635 - RNA, 21 nt, Artificial Sequence
  LDLR targeting guide sequence portion
gcauggcgaggcugagguggg

SEQ ID NO: 5636 - RNA, 21 nt, Artificial Sequence
  LDLR targeting guide sequence portion
gcaugggcacuguccgaagcc

SEQ ID NO: 5637 - RNA, 21 nt, Artificial Sequence
  LDLR targeting guide sequence portion
gcauggugcaucagcagccca

SEQ ID NO: 5638 - RNA, 21 nt, Artificial Sequence
  LDLR targeting guide sequence portion
gcauguuuuaaacacauaccc

SEQ ID NO: 5639 - RNA, 21 nt, Artificial Sequence
  LDLR targeting guide sequence portion
gcauucauugacacgggcuuu

SEQ ID NO: 5640 - RNA, 21 nt, Artificial Sequence
  LDLR targeting guide sequence portion
gcauugccugccagagcuuug

SEQ ID NO: 5641 - RNA, 21 nt, Artificial Sequence
  LDLR targeting guide sequence portion
gcauuuacgugcuccgaaacc

SEQ ID NO: 5642 - RNA, 21 nt, Artificial Sequence
  LDLR targeting guide sequence portion
gcauuucagaggcaauaaccc

SEQ ID NO: 5643 - RNA, 21 nt, Artificial Sequence
  LDLR targeting guide sequence portion
gcauuugaggcugucgugagc

SEQ ID NO: 5644 - RNA, 21 nt, Artificial Sequence
  LDLR targeting guide sequence portion
gcauuugcauagaaguggaag

SEQ ID NO: 5645 - RNA, 21 nt, Artificial Sequence
  LDLR targeting guide sequence portion
gccaaaccccuaaacucagga

SEQ ID NO: 5646 - RNA, 21 nt, Artificial Sequence
  LDLR targeting guide sequence portion
gccaaauguacacaguguaca

SEQ ID NO: 5647 - RNA, 21 nt, Artificial Sequence
  LDLR targeting guide sequence portion
gccaaauucauuuuuuaagag

SEQ ID NO: 5648 - RNA, 21 nt, Artificial Sequence
  LDLR targeting guide sequence portion
gccaagguaaccgggugucuc

SEQ ID NO: 5649 - RNA, 21 nt, Artificial Sequence
  LDLR targeting guide sequence portion
gccaaucccuugugacaucuu

SEQ ID NO: 5650 - RNA, 21 nt, Artificial Sequence
  LDLR targeting guide sequence portion
gccacaccugggugcaggcca

SEQ ID NO: 5651 - RNA, 21 nt, Artificial Sequence
  LDLR targeting guide sequence portion
gccaccacggauucagccaga

SEQ ID NO: 5652 - RNA, 21 nt, Artificial Sequence
  LDLR targeting guide sequence portion
gccaccguacccagcugauuu

SEQ ID NO: 5653 - RNA, 21 nt, Artificial Sequence
  LDLR targeting guide sequence portion
gccacgucauccuccagacug

SEQ ID NO: 5654 - RNA, 21 nt, Artificial Sequence
  LDLR targeting guide sequence portion
gccacguguccucacggccaa

SEQ ID NO: 5655 - RNA, 21 nt, Artificial Sequence
  LDLR targeting guide sequence portion
gccacucauacauacaacggg

SEQ ID NO: 5656 - RNA, 21 nt, Artificial Sequence
  LDLR targeting guide sequence portion
gccacugcgcccggccucacc

SEQ ID NO: 5657 - RNA, 21 nt, Artificial Sequence
  LDLR targeting guide sequence portion
gccacuucccagaggcagagc

SEQ ID NO: 5658 - RNA, 21 nt, Artificial Sequence
  LDLR targeting guide sequence portion
gccacuugcuucucugggccu

SEQ ID NO: 5659 - RNA, 21 nt, Artificial Sequence
  LDLR targeting guide sequence portion
gccagacacaggugccucacg

SEQ ID NO: 5660 - RNA, 21 nt, Artificial Sequence
  LDLR targeting guide sequence portion
gccagaggccaugggcugcug

SEQ ID NO: 5661 - RNA, 21 nt, Artificial Sequence
  LDLR targeting guide sequence portion
gccagaucauuuccgacgcca

SEQ ID NO: 5662 - RNA, 21 nt, Artificial Sequence
  LDLR targeting guide sequence portion
gccaggaaagggauucauggc

SEQ ID NO: 5663 - RNA, 21 nt, Artificial Sequence
  LDLR targeting guide sequence portion
gccagggaaagcccgugucaa

SEQ ID NO: 5664 - RNA, 21 nt, Artificial Sequence
  LDLR targeting guide sequence portion
gccagggggucccguuggugc

SEQ ID NO: 5665 - RNA, 21 nt, Artificial Sequence
  LDLR targeting guide sequence portion
gccagguuagccuuugcccug

SEQ ID NO: 5666 - RNA, 21 nt, Artificial Sequence
  LDLR targeting guide sequence portion
gccaucugcuguuguguguug

SEQ ID NO: 5667 - RNA, 21 nt, Artificial Sequence
  LDLR targeting guide sequence portion
gccaugaaucccuuuccuggc

SEQ ID NO: 5668 - RNA, 21 nt, Artificial Sequence
  LDLR targeting guide sequence portion
gccaugccuggccagaggcca

SEQ ID NO: 5669 - RNA, 21 nt, Artificial Sequence
  LDLR targeting guide sequence portion
gccaugggcugcugaugcacc

SEQ ID NO: 5670 - RNA, 21 nt, Artificial Sequence
  LDLR targeting guide sequence portion
gccauucacuuccccaaucuu

SEQ ID NO: 5671 - RNA, 21 nt, Artificial Sequence
  LDLR targeting guide sequence portion
gccauugcaugggcacugucc

SEQ ID NO: 5672 - RNA, 21 nt, Artificial Sequence
  LDLR targeting guide sequence portion
gccauugucgucuuuaugucc

SEQ ID NO: 5673 - RNA, 21 nt, Artificial Sequence
  LDLR targeting guide sequence portion
gcccaccuagugcuuccacuu

SEQ ID NO: 5674 - RNA, 21 nt, Artificial Sequence
  LDLR targeting guide sequence portion
gcccagaacccuuccugagac

SEQ ID NO: 5675 - RNA, 21 nt, Artificial Sequence
  LDLR targeting guide sequence portion
gcccagagaagcaaguggcuu

SEQ ID NO: 5676 - RNA, 21 nt, Artificial Sequence
  LDLR targeting guide sequence portion
gcccaggcuggaaagcagugg

SEQ ID NO: 5677 - RNA, 21 nt, Artificial Sequence
  LDLR targeting guide sequence portion
gcccauccucccgaccccuac

SEQ ID NO: 5678 - RNA, 21 nt, Artificial Sequence
  LDLR targeting guide sequence portion
gcccaugcaauggcuuggguu

SEQ ID NO: 5679 - RNA, 21 nt, Artificial Sequence
  LDLR targeting guide sequence portion
gcccauggccucuggccaggc

SEQ ID NO: 5680 - RNA, 21 nt, Artificial Sequence
  LDLR targeting guide sequence portion
gccccgagaauagucacugaa

SEQ ID NO: 5681 - RNA, 21 nt, Artificial Sequence
  LDLR targeting guide sequence portion
gccccucucuguccccggcau

SEQ ID NO: 5682 - RNA, 21 nt, Artificial Sequence
  LDLR targeting guide sequence portion
gcccggccucaccgugcaugu

SEQ ID NO: 5683 - RNA, 21 nt, Artificial Sequence
  LDLR targeting guide sequence portion
gcccggggggaccaggaugac

SEQ ID NO: 5684 - RNA, 21 nt, Artificial Sequence
  LDLR targeting guide sequence portion
gcccgugucaaugaaugccgg

SEQ ID NO: 5685 - RNA, 21 nt, Artificial Sequence
  LDLR targeting guide sequence portion
gcccugccucauccaccaauc

SEQ ID NO: 5686 - RNA, 21 nt, Artificial Sequence
  LDLR targeting guide sequence portion
gcccugucacccccgaaucau

SEQ ID NO: 5687 - RNA, 21 nt, Artificial Sequence
  LDLR targeting guide sequence portion
gcccuguguaggggguuauug

SEQ ID NO: 5688 - RNA, 21 nt, Artificial Sequence
  LDLR targeting guide sequence portion
gccggccuuguuuuauucaaa

SEQ ID NO: 5689 - RNA, 21 nt, Artificial Sequence
  LDLR targeting guide sequence portion
gccggcgaggucucaggaagg

SEQ ID NO: 5690 - RNA, 21 nt, Artificial Sequence
  LDLR targeting guide sequence portion
gccggggacagagaggggcag

SEQ ID NO: 5691 - RNA, 21 nt, Artificial Sequence
  LDLR targeting guide sequence portion
gccgugaggacacguggccug

SEQ ID NO: 5692 - RNA, 21 nt, Artificial Sequence
  LDLR targeting guide sequence portion
gccgugaucgugaauaucgag

SEQ ID NO: 5693 - RNA, 21 nt, Artificial Sequence
  LDLR targeting guide sequence portion
gccguguuacuguugcacuga

SEQ ID NO: 5694 - RNA, 21 nt, Artificial Sequence
  LDLR targeting guide sequence portion
gccucaaaugccugagcucaa

SEQ ID NO: 5695 - RNA, 21 nt, Artificial Sequence
  LDLR targeting guide sequence portion
gccucaccgugcauguuuuaa

SEQ ID NO: 5696 - RNA, 21 nt, Artificial Sequence
  LDLR targeting guide sequence portion
gccucauccaccaaucucuaa

SEQ ID NO: 5697 - RNA, 21 nt, Artificial Sequence
  LDLR targeting guide sequence portion
gccuccaagccauucacuucc

SEQ ID NO: 5698 - RNA, 21 nt, Artificial Sequence
  LDLR targeting guide sequence portion
gccuccgucagacucccgcgu

SEQ ID NO: 5699 - RNA, 21 nt, Artificial Sequence
  LDLR targeting guide sequence portion
gccucgccaugccuggccaga

SEQ ID NO: 5700 - RNA, 21 nt, Artificial Sequence
  LDLR targeting guide sequence portion
gccucugaaaugccucuucuu

SEQ ID NO: 5701 - RNA, 21 nt, Artificial Sequence
  LDLR targeting guide sequence portion
gccucuggccaggcauggcga

SEQ ID NO: 5702 - RNA, 21 nt, Artificial Sequence
  LDLR targeting guide sequence portion
gccucugggaaguggcaucau

SEQ ID NO: 5703 - RNA, 21 nt, Artificial Sequence
  LDLR targeting guide sequence portion
gccugacauccccuccccuuu

SEQ ID NO: 5704 - RNA, 21 nt, Artificial Sequence
  LDLR targeting guide sequence portion
gccugagacacccgguuaccu

SEQ ID NO: 5705 - RNA, 21 nt, Artificial Sequence
  LDLR targeting guide sequence portion
gccugagcaacaaagcgagau

SEQ ID NO: 5706 - RNA, 21 nt, Artificial Sequence
  LDLR targeting guide sequence portion
gccugagcucaaaccauccuc

SEQ ID NO: 5707 - RNA, 21 nt, Artificial Sequence
  LDLR targeting guide sequence portion
gccugagucacuggucacccu

SEQ ID NO: 5708 - RNA, 21 nt, Artificial Sequence
  LDLR targeting guide sequence portion
gccugcacccagguguggcug

SEQ ID NO: 5709 - RNA, 21 nt, Artificial Sequence
  LDLR targeting guide sequence portion
gccugccagagcuuuguuuua

SEQ ID NO: 5710 - RNA, 21 nt, Artificial Sequence
  LDLR targeting guide sequence portion
gccuggagucccgucccugcc

SEQ ID NO: 5711 - RNA, 21 nt, Artificial Sequence
  LDLR targeting guide sequence portion
gccuggccagaggccaugggc

SEQ ID NO: 5712 - RNA, 21 nt, Artificial Sequence
  LDLR targeting guide sequence portion
gccugggaucccaucccaaca

SEQ ID NO: 5713 - RNA, 21 nt, Artificial Sequence
  LDLR targeting guide sequence portion
gccuggugcccauccucccga

SEQ ID NO: 5714 - RNA, 21 nt, Artificial Sequence
  LDLR targeting guide sequence portion
gccuguucugccucccagaug

SEQ ID NO: 5715 - RNA, 21 nt, Artificial Sequence
  LDLR targeting guide sequence portion
gccuguuucucuuauccuuca

SEQ ID NO: 5716 - RNA, 21 nt, Artificial Sequence
  LDLR targeting guide sequence portion
gccuugcuagacagccagguu

SEQ ID NO: 5717 - RNA, 21 nt, Artificial Sequence
  LDLR targeting guide sequence portion
gccuuguuuuauucaaagaca

SEQ ID NO: 5718 - RNA, 21 nt, Artificial Sequence
  LDLR targeting guide sequence portion
gccuuucugguuucggagcac

SEQ ID NO: 5719 - RNA, 21 nt, Artificial Sequence
  LDLR targeting guide sequence portion
gccuuugcccugucacccccg

SEQ ID NO: 5720 - RNA, 21 nt, Artificial Sequence
  LDLR targeting guide sequence portion
gcgagaucccaucucuacaaa

SEQ ID NO: 5721 - RNA, 21 nt, Artificial Sequence
  LDLR targeting guide sequence portion
gcgaggucucaggaaggguuc

SEQ ID NO: 5722 - RNA, 21 nt, Artificial Sequence
  LDLR targeting guide sequence portion
gcgauuucagaaagaaccuga

SEQ ID NO: 5723 - RNA, 21 nt, Artificial Sequence
  LDLR targeting guide sequence portion
gcgcccggccucaccgugcau

SEQ ID NO: 5724 - RNA, 21 nt, Artificial Sequence
  LDLR targeting guide sequence portion
gcggacauaaagacgacaaug

SEQ ID NO: 5725 - RNA, 21 nt, Artificial Sequence
  LDLR targeting guide sequence portion
gcgggagucugacggaggcug

SEQ ID NO: 5726 - RNA, 21 nt, Artificial Sequence
  LDLR targeting guide sequence portion
gcgucccuguacagauagugg

SEQ ID NO: 5727 - RNA, 21 nt, Artificial Sequence
  LDLR targeting guide sequence portion
gcgucggaaaugaucuggcug

SEQ ID NO: 5728 - RNA, 21 nt, Artificial Sequence
  LDLR targeting guide sequence portion
gcgugaacaucugccuggagu

SEQ ID NO: 5729 - RNA, 21 nt, Artificial Sequence
  LDLR targeting guide sequence portion
gcgugaagaugucacaaggga

SEQ ID NO: 5730 - RNA, 21 nt, Artificial Sequence
  LDLR targeting guide sequence portion
gcgugaggcaccugugucugg

SEQ ID NO: 5731 - RNA, 21 nt, Artificial Sequence
  LDLR targeting guide sequence portion
gcguugcacacaguccaguuc

SEQ ID NO: 5732 - RNA, 21 nt, Artificial Sequence
  LDLR targeting guide sequence portion
gcuaaccuggcugucuagcaa

SEQ ID NO: 5733 - RNA, 21 nt, Artificial Sequence
  LDLR targeting guide sequence portion
gcuacaaaaaccuucuauaca

SEQ ID NO: 5734 - RNA, 21 nt, Artificial Sequence
  LDLR targeting guide sequence portion
gcuagacagccagguuagccu

SEQ ID NO: 5735 - RNA, 21 nt, Artificial Sequence
  LDLR targeting guide sequence portion
gcuaugauuaugccacugcuu

SEQ ID NO: 5736 - RNA, 21 nt, Artificial Sequence
  LDLR targeting guide sequence portion
gcucacgacagccucaaaugc

SEQ ID NO: 5737 - RNA, 21 nt, Artificial Sequence
  LDLR targeting guide sequence portion
gcucaggcauuugaggcuguc

SEQ ID NO: 5738 - RNA, 21 nt, Artificial Sequence
  LDLR targeting guide sequence portion
gcucaggccuggucuccaacu

SEQ ID NO: 5739 - RNA, 21 nt, Artificial Sequence
  LDLR targeting guide sequence portion
gcuccgaaaccagaaaggcuu

SEQ ID NO: 5740 - RNA, 21 nt, Artificial Sequence
  LDLR targeting guide sequence portion
gcucgaucauggcucacugca

SEQ ID NO: 5741 - RNA, 21 nt, Artificial Sequence
  LDLR targeting guide sequence portion
gcucugccucugggaaguggc

SEQ ID NO: 5742 - RNA, 21 nt, Artificial Sequence
  LDLR targeting guide sequence portion
gcucuggcaggcaaugcuuug

SEQ ID NO: 5743 - RNA, 21 nt, Artificial Sequence
  LDLR targeting guide sequence portion
gcugaauccgugguggcaccg

SEQ ID NO: 5744 - RNA, 21 nt, Artificial Sequence
  LDLR targeting guide sequence portion
gcugagcuggaucacuugagu

SEQ ID NO: 5745 - RNA, 21 nt, Artificial Sequence
  LDLR targeting guide sequence portion
gcugcugaugcaccaugcaug

SEQ ID NO: 5746 - RNA, 21 nt, Artificial Sequence
  LDLR targeting guide sequence portion
gcuggaaagcaguggcauaau

SEQ ID NO: 5747 - RNA, 21 nt, Artificial Sequence
  LDLR targeting guide sequence portion
gcuggaucacuugaguucagg

SEQ ID NO: 5748 - RNA, 21 nt, Artificial Sequence
  LDLR targeting guide sequence portion
gcuggguacgguggcacgugc

SEQ ID NO: 5749 - RNA, 21 nt, Artificial Sequence
  LDLR targeting guide sequence portion
gcugguguccugacagccaca

SEQ ID NO: 5750 - RNA, 21 nt, Artificial Sequence
  LDLR targeting guide sequence portion
gcuguauuuguucagugacua

SEQ ID NO: 5751 - RNA, 21 nt, Artificial Sequence
  LDLR targeting guide sequence portion
gcugucacugucucuccggac

SEQ ID NO: 5752 - RNA, 21 nt, Artificial Sequence
  LDLR targeting guide sequence portion
gcugucaggacaccagccugg

SEQ ID NO: 5753 - RNA, 21 nt, Artificial Sequence
  LDLR targeting guide sequence portion
gcugucuagcaaggcuugcau

SEQ ID NO: 5754 - RNA, 21 nt, Artificial Sequence
  LDLR targeting guide sequence portion
gcuguuguguguugaaagcca

SEQ ID NO: 5755 - RNA, 21 nt, Artificial Sequence
  LDLR targeting guide sequence portion
gcuuaaggaagguacaaaccc

SEQ ID NO: 5756 - RNA, 21 nt, Artificial Sequence
  LDLR targeting guide sequence portion
gcuuagagauugguggaugag

SEQ ID NO: 5757 - RNA, 21 nt, Artificial Sequence
  LDLR targeting guide sequence portion
gcuuaucacgguucccugcac

SEQ ID NO: 5758 - RNA, 21 nt, Artificial Sequence
  LDLR targeting guide sequence portion
gcuuccacuucuaugcaaaug

SEQ ID NO: 5759 - RNA, 21 nt, Artificial Sequence
  LDLR targeting guide sequence portion
gcuucggacagugcccaugca

SEQ ID NO: 5760 - RNA, 21 nt, Artificial Sequence
  LDLR targeting guide sequence portion
gcuucucugggccugacaucc

SEQ ID NO: 5761 - RNA, 21 nt, Artificial Sequence
  LDLR targeting guide sequence portion
gcuucugggagauggguguca

SEQ ID NO: 5762 - RNA, 21 nt, Artificial Sequence
  LDLR targeting guide sequence portion
gcuugcauagaagagguaaac

SEQ ID NO: 5763 - RNA, 21 nt, Artificial Sequence
  LDLR targeting guide sequence portion
gcuuggaggcauuugcauaga

SEQ ID NO: 5764 - RNA, 21 nt, Artificial Sequence
  LDLR targeting guide sequence portion
gcuuggguugggauuuugguu

SEQ ID NO: 5765 - RNA, 21 nt, Artificial Sequence
  LDLR targeting guide sequence portion
gcuuucaacacacaacagcag

SEQ ID NO: 5766 - RNA, 21 nt, Artificial Sequence
  LDLR targeting guide sequence portion
gcuuuccagccugggcaacau

SEQ ID NO: 5767 - RNA, 21 nt, Artificial Sequence
  LDLR targeting guide sequence portion
gcuuucccuggccugggaucc

SEQ ID NO: 5768 - RNA, 21 nt, Artificial Sequence
  LDLR targeting guide sequence portion
gcuuugaagucccggucaacc

SEQ ID NO: 5769 - RNA, 21 nt, Artificial Sequence
  LDLR targeting guide sequence portion
gcuuuggucuucucugucuuu

SEQ ID NO: 5770 - RNA, 21 nt, Artificial Sequence
  LDLR targeting guide sequence portion
gcuuuguugcucaggccuggu

SEQ ID NO: 5771 - RNA, 21 nt, Artificial Sequence
  LDLR targeting guide sequence portion
gcuuuuugggagaaugauguc

SEQ ID NO: 5772 - RNA, 21 nt, Artificial Sequence
  LDLR targeting guide sequence portion
ggaaagcaguggcauaaucau

SEQ ID NO: 5773 - RNA, 21 nt, Artificial Sequence
  LDLR targeting guide sequence portion
ggaaagcccgugucaaugaau

SEQ ID NO: 5774 - RNA, 21 nt, Artificial Sequence
  LDLR targeting guide sequence portion
ggaaaggaagaaaccaaaauc

SEQ ID NO: 5775 - RNA, 21 nt, Artificial Sequence
  LDLR targeting guide sequence portion
ggaaagggauucauggcgucg

SEQ ID NO: 5776 - RNA, 21 nt, Artificial Sequence
  LDLR targeting guide sequence portion
ggaaaugaucuggcugaaucc

SEQ ID NO: 5777 - RNA, 21 nt, Artificial Sequence
  LDLR targeting guide sequence portion
ggaaccgugauaagccuuucu

SEQ ID NO: 5778 - RNA, 21 nt, Artificial Sequence
  LDLR targeting guide sequence portion
ggaagaaaccaaaaucccaac

SEQ ID NO: 5779 - RNA, 21 nt, Artificial Sequence
  LDLR targeting guide sequence portion
ggaagaugaaaggggagggga

SEQ ID NO: 5780 - RNA, 21 nt, Artificial Sequence
  LDLR targeting guide sequence portion
ggaagcacuaggugggcggac

SEQ ID NO: 5781 - RNA, 21 nt, Artificial Sequence
  LDLR targeting guide sequence portion
ggaaggguucugggcagggac

SEQ ID NO: 5782 - RNA, 21 nt, Artificial Sequence
  LDLR targeting guide sequence portion
ggaagguacaaacccaccucg

SEQ ID NO: 5783 - RNA, 21 nt, Artificial Sequence
  LDLR targeting guide sequence portion
ggaagugaauggcuuggaggc

SEQ ID NO: 5784 - RNA, 21 nt, Artificial Sequence
  LDLR targeting guide sequence portion
ggaaguggcaucauuugguga

SEQ ID NO: 5785 - RNA, 21 nt, Artificial Sequence
  LDLR targeting guide sequence portion
ggaaguggguaggggucggga

SEQ ID NO: 5786 - RNA, 21 nt, Artificial Sequence
  LDLR targeting guide sequence portion
ggaaguuuugaguuucucucc

SEQ ID NO: 5787 - RNA, 21 nt, Artificial Sequence
  LDLR targeting guide sequence portion
ggaauggaaguggguaggggu

SEQ ID NO: 5788 - RNA, 21 nt, Artificial Sequence
  LDLR targeting guide sequence portion
ggacaauugccaaucccuugu

SEQ ID NO: 5789 - RNA, 21 nt, Artificial Sequence
  LDLR targeting guide sequence portion
ggacacaguguuuugucccug

SEQ ID NO: 5790 - RNA, 21 nt, Artificial Sequence
  LDLR targeting guide sequence portion
ggacacguggccugcacccag

SEQ ID NO: 5791 - RNA, 21 nt, Artificial Sequence
  LDLR targeting guide sequence portion
ggacagagaggggcagguuga

SEQ ID NO: 5792 - RNA, 21 nt, Artificial Sequence
  LDLR targeting guide sequence portion
ggacagugcccaugcaauggc

SEQ ID NO: 5793 - RNA, 21 nt, Artificial Sequence
  LDLR targeting guide sequence portion
ggacauaaagacgacaauggc

SEQ ID NO: 5794 - RNA, 21 nt, Artificial Sequence
  LDLR targeting guide sequence portion
ggacaucagugcaacaguaac

SEQ ID NO: 5795 - RNA, 21 nt, Artificial Sequence
  LDLR targeting guide sequence portion
ggacaucauucucccaaaaag

SEQ ID NO: 5796 - RNA, 21 nt, Artificial Sequence
  LDLR targeting guide sequence portion
ggaccaggaugacaccuccau

SEQ ID NO: 5797 - RNA, 21 nt, Artificial Sequence
  LDLR targeting guide sequence portion
ggacccccuggcccugccuca

SEQ ID NO: 5798 - RNA, 21 nt, Artificial Sequence
  LDLR targeting guide sequence portion
ggacgcauuuacgugcuccga

SEQ ID NO: 5799 - RNA, 21 nt, Artificial Sequence
  LDLR targeting guide sequence portion
ggacgggacuccaggcagaug

SEQ ID NO: 5800 - RNA, 21 nt, Artificial Sequence
  LDLR targeting guide sequence portion
ggacuccaggcagauguucac

SEQ ID NO: 5801 - RNA, 21 nt, Artificial Sequence
  LDLR targeting guide sequence portion
ggacugugugcaacgcuuuuu

SEQ ID NO: 5802 - RNA, 21 nt, Artificial Sequence
  LDLR targeting guide sequence portion
ggacuucaaagccgugaucgu

SEQ ID NO: 5803 - RNA, 21 nt, Artificial Sequence
  LDLR targeting guide sequence portion
ggacuucagguucuuucugaa

SEQ ID NO: 5804 - RNA, 21 nt, Artificial Sequence
  LDLR targeting guide sequence portion
ggagaaugauguccccguugu

SEQ ID NO: 5805 - RNA, 21 nt, Artificial Sequence
  LDLR targeting guide sequence portion
ggagaccacgggaauggaagu

SEQ ID NO: 5806 - RNA, 21 nt, Artificial Sequence
  LDLR targeting guide sequence portion
ggagaccaggccugagcaaca

SEQ ID NO: 5807 - RNA, 21 nt, Artificial Sequence
  LDLR targeting guide sequence portion
ggagagaaacucaaaacuucc

SEQ ID NO: 5808 - RNA, 21 nt, Artificial Sequence
  LDLR targeting guide sequence portion
ggagagaaauggaggugucau

SEQ ID NO: 5809 - RNA, 21 nt, Artificial Sequence
  LDLR targeting guide sequence portion
ggagagacagugacagccucc

SEQ ID NO: 5810 - RNA, 21 nt, Artificial Sequence
  LDLR targeting guide sequence portion
ggagaugggugucacuuuuua

SEQ ID NO: 5811 - RNA, 21 nt, Artificial Sequence
  LDLR targeting guide sequence portion
ggagcacguaaaugcgucccu

SEQ ID NO: 5812 - RNA, 21 nt, Artificial Sequence
  LDLR targeting guide sequence portion
ggaggaugacguggcgugaac

SEQ ID NO: 5813 - RNA, 21 nt, Artificial Sequence
  LDLR targeting guide sequence portion
ggaggaugggcaccaggcugg

SEQ ID NO: 5814 - RNA, 21 nt, Artificial Sequence
  LDLR targeting guide sequence portion
ggaggaugguuugagcucagg

SEQ ID NO: 5815 - RNA, 21 nt, Artificial Sequence
  LDLR targeting guide sequence portion
ggaggcagaacaggcuucgga

SEQ ID NO: 5816 - RNA, 21 nt, Artificial Sequence
  LDLR targeting guide sequence portion
ggaggcauuugcauagaagug

SEQ ID NO: 5817 - RNA, 21 nt, Artificial Sequence
  LDLR targeting guide sequence portion
ggaggcugagcuggaucacuu

SEQ ID NO: 5818 - RNA, 21 nt, Artificial Sequence
  LDLR targeting guide sequence portion
ggaggcugucacugucucucc

SEQ ID NO: 5819 - RNA, 21 nt, Artificial Sequence
  LDLR targeting guide sequence portion
ggaggggaugucaggcccaga

SEQ ID NO: 5820 - RNA, 21 nt, Artificial Sequence
  LDLR targeting guide sequence portion
ggaggugucauccuggucccc

SEQ ID NO: 5821 - RNA, 21 nt, Artificial Sequence
  LDLR targeting guide sequence portion
ggagguugcagugagccauga

SEQ ID NO: 5822 - RNA, 21 nt, Artificial Sequence
  LDLR targeting guide sequence portion
ggagucaacguguuuaccucu

SEQ ID NO: 5823 - RNA, 21 nt, Artificial Sequence
  LDLR targeting guide sequence portion
ggagucccgucccugcccaga

SEQ ID NO: 5824 - RNA, 21 nt, Artificial Sequence
  LDLR targeting guide sequence portion
ggagucugacggaggcuguca

SEQ ID NO: 5825 - RNA, 21 nt, Artificial Sequence
  LDLR targeting guide sequence portion
ggaguuggagaccaggccuga

SEQ ID NO: 5826 - RNA, 21 nt, Artificial Sequence
  LDLR targeting guide sequence portion
ggauaagagaaacaggcccgg

SEQ ID NO: 5827 - RNA, 21 nt, Artificial Sequence
  LDLR targeting guide sequence portion
ggaucacaggcacgugccacc

SEQ ID NO: 5828 - RNA, 21 nt, Artificial Sequence
  LDLR targeting guide sequence portion
ggaucccaggccagggaaagc

SEQ ID NO: 5829 - RNA, 21 nt, Artificial Sequence
  LDLR targeting guide sequence portion
ggaucccaucccaacacacac

SEQ ID NO: 5830 - RNA, 21 nt, Artificial Sequence
  LDLR targeting guide sequence portion
ggaucguuugacgggacuuca

SEQ ID NO: 5831 - RNA, 21 nt, Artificial Sequence
  LDLR targeting guide sequence portion
ggaucucgcuuuguugcucag

SEQ ID NO: 5832 - RNA, 21 nt, Artificial Sequence
  LDLR targeting guide sequence portion
ggaugacaccuccauuucucu

SEQ ID NO: 5833 - RNA, 21 nt, Artificial Sequence
  LDLR targeting guide sequence portion
ggaugacguggcgugaacauc

SEQ ID NO: 5834 - RNA, 21 nt, Artificial Sequence
  LDLR targeting guide sequence portion
ggaugaggcagggccaggggg

SEQ ID NO: 5835 - RNA, 21 nt, Artificial Sequence
  LDLR targeting guide sequence portion
ggaugggaucccaggccaggg

SEQ ID NO: 5836 - RNA, 21 nt, Artificial Sequence
  LDLR targeting guide sequence portion
ggaugggcaccaggcuggugu

SEQ ID NO: 5837 - RNA, 21 nt, Artificial Sequence
  LDLR targeting guide sequence portion
ggaugguuugagcucaggcau

SEQ ID NO: 5838 - RNA, 21 nt, Artificial Sequence
  LDLR targeting guide sequence portion
ggaugucaggcccagagaagc

SEQ ID NO: 5839 - RNA, 21 nt, Artificial Sequence
  LDLR targeting guide sequence portion
ggauuacaggcgugaggcacc

SEQ ID NO: 5840 - RNA, 21 nt, Artificial Sequence
  LDLR targeting guide sequence portion
ggauucagccagaucauuucc

SEQ ID NO: 5841 - RNA, 21 nt, Artificial Sequence
  LDLR targeting guide sequence portion
ggauucauggcgucggaaaug

SEQ ID NO: 5842 - RNA, 21 nt, Artificial Sequence
  LDLR targeting guide sequence portion
ggauuggcaauuguccccagg

SEQ ID NO: 5843 - RNA, 21 nt, Artificial Sequence
  LDLR targeting guide sequence portion
ggauugugucacgguggagag

SEQ ID NO: 5844 - RNA, 21 nt, Artificial Sequence
  LDLR targeting guide sequence portion
ggauuuugguuucuuccuuuc

SEQ ID NO: 5845 - RNA, 21 nt, Artificial Sequence
  LDLR targeting guide sequence portion
ggcaaaggcuaaccuggcugu

SEQ ID NO: 5846 - RNA, 21 nt, Artificial Sequence
  LDLR targeting guide sequence portion
ggcaacagaugaagacccuau

SEQ ID NO: 5847 - RNA, 21 nt, Artificial Sequence
  LDLR targeting guide sequence portion
ggcaauaacccccuacacagg

SEQ ID NO: 5848 - RNA, 21 nt, Artificial Sequence
  LDLR targeting guide sequence portion
ggcaaugcuuuggucuucucu

SEQ ID NO: 5849 - RNA, 21 nt, Artificial Sequence
  LDLR targeting guide sequence portion
ggcaauuguccccagggacaa

SEQ ID NO: 5850 - RNA, 21 nt, Artificial Sequence
  LDLR targeting guide sequence portion
ggcaccaacgggacccccugg

SEQ ID NO: 5851 - RNA, 21 nt, Artificial Sequence
  LDLR targeting guide sequence portion
ggcaccaggcugguguccuga

SEQ ID NO: 5852 - RNA, 21 nt, Artificial Sequence
  LDLR targeting guide sequence portion
ggcaccgagaccaaacucauu

SEQ ID NO: 5853 - RNA, 21 nt, Artificial Sequence
  LDLR targeting guide sequence portion
ggcaccugugucuggccaaau

SEQ ID NO: 5854 - RNA, 21 nt, Artificial Sequence
  LDLR targeting guide sequence portion
ggcacgugccaccguacccag

SEQ ID NO: 5855 - RNA, 21 nt, Artificial Sequence
  LDLR targeting guide sequence portion
ggcacuguccgaagccuguuc

SEQ ID NO: 5856 - RNA, 21 nt, Artificial Sequence
  LDLR targeting guide sequence portion
ggcacuuaauaaauauuaagg

SEQ ID NO: 5857 - RNA, 21 nt, Artificial Sequence
  LDLR targeting guide sequence portion
ggcagaacaggcuucggacag

SEQ ID NO: 5858 - RNA, 21 nt, Artificial Sequence
  LDLR targeting guide sequence portion
ggcagagccugagucacuggu

SEQ ID NO: 5859 - RNA, 21 nt, Artificial Sequence
  LDLR targeting guide sequence portion
ggcagauguucacgccacguc

SEQ ID NO: 5860 - RNA, 21 nt, Artificial Sequence
  LDLR targeting guide sequence portion
ggcaggcaaugcuuuggucuu

SEQ ID NO: 5861 - RNA, 21 nt, Artificial Sequence
  LDLR targeting guide sequence portion
ggcagggacgggacuccaggc

SEQ ID NO: 5862 - RNA, 21 nt, Artificial Sequence
  LDLR targeting guide sequence portion
ggcagggccagggggucccgu

SEQ ID NO: 5863 - RNA, 21 nt, Artificial Sequence
  LDLR targeting guide sequence portion
ggcagguugaccgggacuuca

SEQ ID NO: 5864 - RNA, 21 nt, Artificial Sequence
  LDLR targeting guide sequence portion
ggcaguucucgauauucacga

SEQ ID NO: 5865 - RNA, 21 nt, Artificial Sequence
  LDLR targeting guide sequence portion
ggcaucauuuggugaaugagu

SEQ ID NO: 5866 - RNA, 21 nt, Artificial Sequence
  LDLR targeting guide sequence portion
ggcauggcgaggcugaggugg

SEQ ID NO: 5867 - RNA, 21 nt, Artificial Sequence
  LDLR targeting guide sequence portion
ggcauucauugacacgggcuu

SEQ ID NO: 5868 - RNA, 21 nt, Artificial Sequence
  LDLR targeting guide sequence portion
ggcauuucagaggcaauaacc

SEQ ID NO: 5869 - RNA, 21 nt, Artificial Sequence
  LDLR targeting guide sequence portion
ggcauuugaggcugucgugag

SEQ ID NO: 5870 - RNA, 21 nt, Artificial Sequence
  LDLR targeting guide sequence portion
ggcauuugcauagaaguggaa

SEQ ID NO: 5871 - RNA, 21 nt, Artificial Sequence
  LDLR targeting guide sequence portion
ggcauuuguguuauuauuuug

SEQ ID NO: 5872 - RNA, 21 nt, Artificial Sequence
  LDLR targeting guide sequence portion
ggccaaauucauuuuuuaaga

SEQ ID NO: 5873 - RNA, 21 nt, Artificial Sequence
  LDLR targeting guide sequence portion
ggccaagguaaccgggugucu

SEQ ID NO: 5874 - RNA, 21 nt, Artificial Sequence
  LDLR targeting guide sequence portion
ggccacguguccucacggcca

SEQ ID NO: 5875 - RNA, 21 nt, Artificial Sequence
  LDLR targeting guide sequence portion
ggccagacacaggugccucac

SEQ ID NO: 5876 - RNA, 21 nt, Artificial Sequence
  LDLR targeting guide sequence portion
ggccagaggccaugggcugcu

SEQ ID NO: 5877 - RNA, 21 nt, Artificial Sequence
  LDLR targeting guide sequence portion
ggccaggcauggcgaggcuga

SEQ ID NO: 5878 - RNA, 21 nt, Artificial Sequence
  LDLR targeting guide sequence portion
ggccagggaaagcccguguca

SEQ ID NO: 5879 - RNA, 21 nt, Artificial Sequence
  LDLR targeting guide sequence portion
ggccagggggucccguuggug

SEQ ID NO: 5880 - RNA, 21 nt, Artificial Sequence
  LDLR targeting guide sequence portion
ggccaugggcugcugaugcac

SEQ ID NO: 5881 - RNA, 21 nt, Artificial Sequence
  LDLR targeting guide sequence portion
ggcccagagaagcaaguggcu

SEQ ID NO: 5882 - RNA, 21 nt, Artificial Sequence
  LDLR targeting guide sequence portion
ggccccgagaauagucacuga

SEQ ID NO: 5883 - RNA, 21 nt, Artificial Sequence
  LDLR targeting guide sequence portion
ggcccggggggaccaggauga

SEQ ID NO: 5884 - RNA, 21 nt, Artificial Sequence
  LDLR targeting guide sequence portion
ggcccugccucauccaccaau

SEQ ID NO: 5885 - RNA, 21 nt, Artificial Sequence
  LDLR targeting guide sequence portion
ggcccuguguaggggguuauu

SEQ ID NO: 5886 - RNA, 21 nt, Artificial Sequence
  LDLR targeting guide sequence portion
ggccggcgaggucucaggaag

SEQ ID NO: 5887 - RNA, 21 nt, Artificial Sequence
  LDLR targeting guide sequence portion
ggccgugaggacacguggccu

SEQ ID NO: 5888 - RNA, 21 nt, Artificial Sequence
  LDLR targeting guide sequence portion
ggccucaccgugcauguuuua

SEQ ID NO: 5889 - RNA, 21 nt, Artificial Sequence
  LDLR targeting guide sequence portion
ggccucuggccaggcauggcg

SEQ ID NO: 5890 - RNA, 21 nt, Artificial Sequence
  LDLR targeting guide sequence portion
ggccugacauccccuccccuu

SEQ ID NO: 5891 - RNA, 21 nt, Artificial Sequence
  LDLR targeting guide sequence portion
ggccugagcaacaaagcgaga

SEQ ID NO: 5892 - RNA, 21 nt, Artificial Sequence
  LDLR targeting guide sequence portion
ggccugcacccagguguggcu

SEQ ID NO: 5893 - RNA, 21 nt, Artificial Sequence
  LDLR targeting guide sequence portion
ggccugggaucccaucccaac

SEQ ID NO: 5894 - RNA, 21 nt, Artificial Sequence
  LDLR targeting guide sequence portion
ggccuggucuccaacuccuga

SEQ ID NO: 5895 - RNA, 21 nt, Artificial Sequence
  LDLR targeting guide sequence portion
ggccuguuucucuuauccuuc

SEQ ID NO: 5896 - RNA, 21 nt, Artificial Sequence
  LDLR targeting guide sequence portion
ggccuuguuuuauucaaagac

SEQ ID NO: 5897 - RNA, 21 nt, Artificial Sequence
  LDLR targeting guide sequence portion
ggcgaggcugaggugggagga

SEQ ID NO: 5898 - RNA, 21 nt, Artificial Sequence
  LDLR targeting guide sequence portion
ggcgaggucucaggaaggguu

SEQ ID NO: 5899 - RNA, 21 nt, Artificial Sequence
  LDLR targeting guide sequence portion
ggcgauuucagaaagaaccug

SEQ ID NO: 5900 - RNA, 21 nt, Artificial Sequence
  LDLR targeting guide sequence portion
ggcggacauaaagacgacaau

SEQ ID NO: 5901 - RNA, 21 nt, Artificial Sequence
  LDLR targeting guide sequence portion
ggcgucggaaaugaucuggcu

SEQ ID NO: 5902 - RNA, 21 nt, Artificial Sequence
  LDLR targeting guide sequence portion
ggcgugaacaucugccuggag

SEQ ID NO: 5903 - RNA, 21 nt, Artificial Sequence
  LDLR targeting guide sequence portion
ggcgugaggcaccugugucug

SEQ ID NO: 5904 - RNA, 21 nt, Artificial Sequence
  LDLR targeting guide sequence portion
ggcuaaccuggcugucuagca

SEQ ID NO: 5905 - RNA, 21 nt, Artificial Sequence
  LDLR targeting guide sequence portion
ggcuacaaaaaccuucuauac

SEQ ID NO: 5906 - RNA, 21 nt, Artificial Sequence
  LDLR targeting guide sequence portion
ggcucugccucugggaagugg

SEQ ID NO: 5907 - RNA, 21 nt, Artificial Sequence
  LDLR targeting guide sequence portion
ggcugaauccgugguggcacc

SEQ ID NO: 5908 - RNA, 21 nt, Artificial Sequence
  LDLR targeting guide sequence portion
ggcugagcuggaucacuugag

SEQ ID NO: 5909 - RNA, 21 nt, Artificial Sequence
  LDLR targeting guide sequence portion
ggcugcugaugcaccaugcau

SEQ ID NO: 5910 - RNA, 21 nt, Artificial Sequence
  LDLR targeting guide sequence portion
ggcuggaaagcaguggcauaa

SEQ ID NO: 5911 - RNA, 21 nt, Artificial Sequence
  LDLR targeting guide sequence portion
ggcugguguccugacagccac

SEQ ID NO: 5912 - RNA, 21 nt, Artificial Sequence
  LDLR targeting guide sequence portion
ggcugucacugucucuccgga

SEQ ID NO: 5913 - RNA, 21 nt, Artificial Sequence
  LDLR targeting guide sequence portion
ggcugucaggacaccagccug

SEQ ID NO: 5914 - RNA, 21 nt, Artificial Sequence
  LDLR targeting guide sequence portion
ggcugucuagcaaggcuugca

SEQ ID NO: 5915 - RNA, 21 nt, Artificial Sequence
  LDLR targeting guide sequence portion
ggcuuaaggaagguacaaacc

SEQ ID NO: 5916 - RNA, 21 nt, Artificial Sequence
  LDLR targeting guide sequence portion
ggcuuagagauugguggauga

SEQ ID NO: 5917 - RNA, 21 nt, Artificial Sequence
  LDLR targeting guide sequence portion
ggcuuaucacgguucccugca

SEQ ID NO: 5918 - RNA, 21 nt, Artificial Sequence
  LDLR targeting guide sequence portion
ggcuucggacagugcccaugc

SEQ ID NO: 5919 - RNA, 21 nt, Artificial Sequence
  LDLR targeting guide sequence portion
ggcuucugggagauggguguc

SEQ ID NO: 5920 - RNA, 21 nt, Artificial Sequence
  LDLR targeting guide sequence portion
ggcuugcauagaagagguaaa

SEQ ID NO: 5921 - RNA, 21 nt, Artificial Sequence
  LDLR targeting guide sequence portion
ggcuuggaggcauuugcauag

SEQ ID NO: 5922 - RNA, 21 nt, Artificial Sequence
  LDLR targeting guide sequence portion
ggcuuggguugggauuuuggu

SEQ ID NO: 5923 - RNA, 21 nt, Artificial Sequence
  LDLR targeting guide sequence portion
ggcuuucaacacacaacagca

SEQ ID NO: 5924 - RNA, 21 nt, Artificial Sequence
  LDLR targeting guide sequence portion
ggcuuucccuggccugggauc

SEQ ID NO: 5925 - RNA, 21 nt, Artificial Sequence
  LDLR targeting guide sequence portion
ggcuuugaagucccggucaac

SEQ ID NO: 5926 - RNA, 21 nt, Artificial Sequence
  LDLR targeting guide sequence portion
gggaaagcccgugucaaugaa

SEQ ID NO: 5927 - RNA, 21 nt, Artificial Sequence
  LDLR targeting guide sequence portion
gggaaccgugauaagccuuuc

SEQ ID NO: 5928 - RNA, 21 nt, Artificial Sequence
  LDLR targeting guide sequence portion
gggaagugaauggcuuggagg

SEQ ID NO: 5929 - RNA, 21 nt, Artificial Sequence
  LDLR targeting guide sequence portion
gggaaguggcaucauuuggug

SEQ ID NO: 5930 - RNA, 21 nt, Artificial Sequence
  LDLR targeting guide sequence portion
gggaauggaaguggguagggg

SEQ ID NO: 5931 - RNA, 21 nt, Artificial Sequence
  LDLR targeting guide sequence portion
gggacaauugccaaucccuug

SEQ ID NO: 5932 - RNA, 21 nt, Artificial Sequence
  LDLR targeting guide sequence portion
gggacacaguguuuugucccu

SEQ ID NO: 5933 - RNA, 21 nt, Artificial Sequence
  LDLR targeting guide sequence portion
gggacagagaggggcagguug

SEQ ID NO: 5934 - RNA, 21 nt, Artificial Sequence
  LDLR targeting guide sequence portion
gggacaucauucucccaaaaa

SEQ ID NO: 5935 - RNA, 21 nt, Artificial Sequence
  LDLR targeting guide sequence portion
gggaccaggaugacaccucca

SEQ ID NO: 5936 - RNA, 21 nt, Artificial Sequence
  LDLR targeting guide sequence portion
gggacccccuggcccugccuc

SEQ ID NO: 5937 - RNA, 21 nt, Artificial Sequence
  LDLR targeting guide sequence portion
gggacgcauuuacgugcuccg

SEQ ID NO: 5938 - RNA, 21 nt, Artificial Sequence
  LDLR targeting guide sequence portion
gggacgggacuccaggcagau

SEQ ID NO: 5939 - RNA, 21 nt, Artificial Sequence
  LDLR targeting guide sequence portion
gggacuccaggcagauguuca

SEQ ID NO: 5940 - RNA, 21 nt, Artificial Sequence
  LDLR targeting guide sequence portion
gggacuucaaagccgugaucg

SEQ ID NO: 5941 - RNA, 21 nt, Artificial Sequence
  LDLR targeting guide sequence portion
gggacuucagguucuuucuga

SEQ ID NO: 5942 - RNA, 21 nt, Artificial Sequence
  LDLR targeting guide sequence portion
gggagaaugauguccccguug

SEQ ID NO: 5943 - RNA, 21 nt, Artificial Sequence
  LDLR targeting guide sequence portion
gggagaugggugucacuuuuu

SEQ ID NO: 5944 - RNA, 21 nt, Artificial Sequence
  LDLR targeting guide sequence portion
gggaggaugggcaccaggcug

SEQ ID NO: 5945 - RNA, 21 nt, Artificial Sequence
  LDLR targeting guide sequence portion
gggaggaugguuugagcucag

SEQ ID NO: 5946 - RNA, 21 nt, Artificial Sequence
  LDLR targeting guide sequence portion
gggaggcagaacaggcuucgg

SEQ ID NO: 5947 - RNA, 21 nt, Artificial Sequence
  LDLR targeting guide sequence portion
gggaggcugagcuggaucacu

SEQ ID NO: 5948 - RNA, 21 nt, Artificial Sequence
  LDLR targeting guide sequence portion
gggaggggaugucaggcccag

SEQ ID NO: 5949 - RNA, 21 nt, Artificial Sequence
  LDLR targeting guide sequence portion
gggagucugacggaggcuguc

SEQ ID NO: 5950 - RNA, 21 nt, Artificial Sequence
  LDLR targeting guide sequence portion
gggaucccaggccagggaaag

SEQ ID NO: 5951 - RNA, 21 nt, Artificial Sequence
  LDLR targeting guide sequence portion
gggaucccaucccaacacaca

SEQ ID NO: 5952 - RNA, 21 nt, Artificial Sequence
  LDLR targeting guide sequence portion
gggaucucgcuuuguugcuca

SEQ ID NO: 5953 - RNA, 21 nt, Artificial Sequence
  LDLR targeting guide sequence portion
gggaugggaucccaggccagg

SEQ ID NO: 5954 - RNA, 21 nt, Artificial Sequence
  LDLR targeting guide sequence portion
gggaugucaggcccagagaag

SEQ ID NO: 5955 - RNA, 21 nt, Artificial Sequence
  LDLR targeting guide sequence portion
gggauuacaggcgugaggcac

SEQ ID NO: 5956 - RNA, 21 nt, Artificial Sequence
  LDLR targeting guide sequence portion
gggauucauggcgucggaaau

SEQ ID NO: 5957 - RNA, 21 nt, Artificial Sequence
  LDLR targeting guide sequence portion
gggauuggcaauuguccccag

SEQ ID NO: 5958 - RNA, 21 nt, Artificial Sequence
  LDLR targeting guide sequence portion
gggauuuugguuucuuccuuu

SEQ ID NO: 5959 - RNA, 21 nt, Artificial Sequence
  LDLR targeting guide sequence portion
gggauuuuuuguuauguuugc

SEQ ID NO: 5960 - RNA, 21 nt, Artificial Sequence
  LDLR targeting guide sequence portion
gggcaaaggcuaaccuggcug

SEQ ID NO: 5961 - RNA, 21 nt, Artificial Sequence
  LDLR targeting guide sequence portion
gggcaacagaugaagacccua

SEQ ID NO: 5962 - RNA, 21 nt, Artificial Sequence
  LDLR targeting guide sequence portion
gggcaccaggcugguguccug

SEQ ID NO: 5963 - RNA, 21 nt, Artificial Sequence
  LDLR targeting guide sequence portion
gggcacuguccgaagccuguu

SEQ ID NO: 5964 - RNA, 21 nt, Artificial Sequence
  LDLR targeting guide sequence portion
gggcagggacgggacuccagg

SEQ ID NO: 5965 - RNA, 21 nt, Artificial Sequence
  LDLR targeting guide sequence portion
gggcagguugaccgggacuuc

SEQ ID NO: 5966 - RNA, 21 nt, Artificial Sequence
  LDLR targeting guide sequence portion
gggccagggggucccguuggu

SEQ ID NO: 5967 - RNA, 21 nt, Artificial Sequence
  LDLR targeting guide sequence portion
gggccccgagaauagucacug

SEQ ID NO: 5968 - RNA, 21 nt, Artificial Sequence
  LDLR targeting guide sequence portion
gggcccuguguaggggguuau

SEQ ID NO: 5969 - RNA, 21 nt, Artificial Sequence
  LDLR targeting guide sequence portion
gggccugacauccccuccccu

SEQ ID NO: 5970 - RNA, 21 nt, Artificial Sequence
  LDLR targeting guide sequence portion
gggccuguuucucuuauccuu

SEQ ID NO: 5971 - RNA, 21 nt, Artificial Sequence
  LDLR targeting guide sequence portion
gggcggacauaaagacgacaa

SEQ ID NO: 5972 - RNA, 21 nt, Artificial Sequence
  LDLR targeting guide sequence portion
gggcugcugaugcaccaugca

SEQ ID NO: 5973 - RNA, 21 nt, Artificial Sequence
  LDLR targeting guide sequence portion
gggcuuucccuggccugggau

SEQ ID NO: 5974 - RNA, 21 nt, Artificial Sequence
  LDLR targeting guide sequence portion
ggggaagugaauggcuuggag

SEQ ID NO: 5975 - RNA, 21 nt, Artificial Sequence
  LDLR targeting guide sequence portion
ggggacaauugccaaucccuu

SEQ ID NO: 5976 - RNA, 21 nt, Artificial Sequence
  LDLR targeting guide sequence portion
ggggacacaguguuuuguccc

SEQ ID NO: 5977 - RNA, 21 nt, Artificial Sequence
  LDLR targeting guide sequence portion
ggggacagagaggggcagguu

SEQ ID NO: 5978 - RNA, 21 nt, Artificial Sequence
  LDLR targeting guide sequence portion
ggggacaucauucucccaaaa

SEQ ID NO: 5979 - RNA, 21 nt, Artificial Sequence
  LDLR targeting guide sequence portion
ggggaccaggaugacaccucc

SEQ ID NO: 5980 - RNA, 21 nt, Artificial Sequence
  LDLR targeting guide sequence portion
ggggaggggaugucaggccca

SEQ ID NO: 5981 - RNA, 21 nt, Artificial Sequence
  LDLR targeting guide sequence portion
ggggaugucaggcccagagaa

SEQ ID NO: 5982 - RNA, 21 nt, Artificial Sequence
  LDLR targeting guide sequence portion
ggggauuuuuuguuauguuug

SEQ ID NO: 5983 - RNA, 21 nt, Artificial Sequence
  LDLR targeting guide sequence portion
ggggcagguugaccgggacuu

SEQ ID NO: 5984 - RNA, 21 nt, Artificial Sequence
  LDLR targeting guide sequence portion
ggggcccuguguaggggguua

SEQ ID NO: 5985 - RNA, 21 nt, Artificial Sequence
  LDLR targeting guide sequence portion
gggggacacaguguuuugucc

SEQ ID NO: 5986 - RNA, 21 nt, Artificial Sequence
  LDLR targeting guide sequence portion
gggggaccaggaugacaccuc

SEQ ID NO: 5987 - RNA, 21 nt, Artificial Sequence
  LDLR targeting guide sequence portion
ggggggacacaguguuuuguc

SEQ ID NO: 5988 - RNA, 21 nt, Artificial Sequence
  LDLR targeting guide sequence portion
ggggggaccaggaugacaccu

SEQ ID NO: 5989 - RNA, 21 nt, Artificial Sequence
  LDLR targeting guide sequence portion
gggggucccguuggugccauc

SEQ ID NO: 5990 - RNA, 21 nt, Artificial Sequence
  LDLR targeting guide sequence portion
gggggugacagggcaaaggcu

SEQ ID NO: 5991 - RNA, 21 nt, Artificial Sequence
  LDLR targeting guide sequence portion
ggggguuauugccucugaaau

SEQ ID NO: 5992 - RNA, 21 nt, Artificial Sequence
  LDLR targeting guide sequence portion
ggggucccguuggugccaucu

SEQ ID NO: 5993 - RNA, 21 nt, Artificial Sequence
  LDLR targeting guide sequence portion
ggggucgggaggaugggcacc

SEQ ID NO: 5994 - RNA, 21 nt, Artificial Sequence
  LDLR targeting guide sequence portion
ggggugacagggcaaaggcua

SEQ ID NO: 5995 - RNA, 21 nt, Artificial Sequence
  LDLR targeting guide sequence portion
gggguuauugccucugaaaug

SEQ ID NO: 5996 - RNA, 21 nt, Artificial Sequence
  LDLR targeting guide sequence portion
gggguuuggcuuagagauugg

SEQ ID NO: 5997 - RNA, 21 nt, Artificial Sequence
  LDLR targeting guide sequence portion
ggguacgguggcacgugccug

SEQ ID NO: 5998 - RNA, 21 nt, Artificial Sequence
  LDLR targeting guide sequence portion
ggguaggggucgggaggaugg

SEQ ID NO: 5999 - RNA, 21 nt, Artificial Sequence
  LDLR targeting guide sequence portion
ggguauguguuuaaaacaugc

SEQ ID NO: 6000 - RNA, 21 nt, Artificial Sequence
  LDLR targeting guide sequence portion
gggucaugauucgggggugac

SEQ ID NO: 6001 - RNA, 21 nt, Artificial Sequence
  LDLR targeting guide sequence portion
gggucccguuggugccaucug

SEQ ID NO: 6002 - RNA, 21 nt, Artificial Sequence
  LDLR targeting guide sequence portion
gggucgggaggaugggcacca

SEQ ID NO: 6003 - RNA, 21 nt, Artificial Sequence
  LDLR targeting guide sequence portion
gggugacagggcaaaggcuaa

SEQ ID NO: 6004 - RNA, 21 nt, Artificial Sequence
  LDLR targeting guide sequence portion
gggugaccagugacucaggcu

SEQ ID NO: 6005 - RNA, 21 nt, Artificial Sequence
  LDLR targeting guide sequence portion
gggugcaggccacguguccuc

SEQ ID NO: 6006 - RNA, 21 nt, Artificial Sequence
  LDLR targeting guide sequence portion
gggugggucaugauucggggg

SEQ ID NO: 6007 - RNA, 21 nt, Artificial Sequence
  LDLR targeting guide sequence portion
gggugucacuuuuuaaaccac

SEQ ID NO: 6008 - RNA, 21 nt, Artificial Sequence
  LDLR targeting guide sequence portion
gggugucucaggcacuuaaua

SEQ ID NO: 6009 - RNA, 21 nt, Artificial Sequence
  LDLR targeting guide sequence portion
ggguuauugccucugaaaugc

SEQ ID NO: 6010 - RNA, 21 nt, Artificial Sequence
  LDLR targeting guide sequence portion
ggguucugggcagggacggga

SEQ ID NO: 6011 - RNA, 21 nt, Artificial Sequence
  LDLR targeting guide sequence portion
ggguugggauuuugguuucuu

SEQ ID NO: 6012 - RNA, 21 nt, Artificial Sequence
  LDLR targeting guide sequence portion
ggguuuggcuuagagauuggu

SEQ ID NO: 6013 - RNA, 21 nt, Artificial Sequence
  LDLR targeting guide sequence portion
ggguuuguaccuuccuuaagc

SEQ ID NO: 6014 - RNA, 21 nt, Artificial Sequence
  LDLR targeting guide sequence portion
gguaaacacguugacuccuga

SEQ ID NO: 6015 - RNA, 21 nt, Artificial Sequence
  LDLR targeting guide sequence portion
gguaaccgggugucucaggca

SEQ ID NO: 6016 - RNA, 21 nt, Artificial Sequence
  LDLR targeting guide sequence portion
gguacaaacccaccucgaaag

SEQ ID NO: 6017 - RNA, 21 nt, Artificial Sequence
  LDLR targeting guide sequence portion
gguaggggucgggaggauggg

SEQ ID NO: 6018 - RNA, 21 nt, Artificial Sequence
  LDLR targeting guide sequence portion
gguauguguuuaaaacaugca

SEQ ID NO: 6019 - RNA, 21 nt, Artificial Sequence
  LDLR targeting guide sequence portion
ggucaaccugccccucucugu

SEQ ID NO: 6020 - RNA, 21 nt, Artificial Sequence
  LDLR targeting guide sequence portion
ggucacccuuaauauuuauua

SEQ ID NO: 6021 - RNA, 21 nt, Artificial Sequence
  LDLR targeting guide sequence portion
ggucagucuggaggaugacgu

SEQ ID NO: 6022 - RNA, 21 nt, Artificial Sequence
  LDLR targeting guide sequence portion
ggucaugauucgggggugaca

SEQ ID NO: 6023 - RNA, 21 nt, Artificial Sequence
  LDLR targeting guide sequence portion
gguccccccgggccuguuucu

SEQ ID NO: 6024 - RNA, 21 nt, Artificial Sequence
  LDLR targeting guide sequence portion
ggucccguuggugccaucugc

SEQ ID NO: 6025 - RNA, 21 nt, Artificial Sequence
  LDLR targeting guide sequence portion
ggucgggaggaugggcaccag

SEQ ID NO: 6026 - RNA, 21 nt, Artificial Sequence
  LDLR targeting guide sequence portion
ggucucaggaaggguucuggg

SEQ ID NO: 6027 - RNA, 21 nt, Artificial Sequence
  LDLR targeting guide sequence portion
ggucuccuugcacuuucucag

SEQ ID NO: 6028 - RNA, 21 nt, Artificial Sequence
  LDLR targeting guide sequence portion
ggucucggugccaccacggau

SEQ ID NO: 6029 - RNA, 21 nt, Artificial Sequence
  LDLR targeting guide sequence portion
ggucuucucugucuuugaaua

SEQ ID NO: 6030 - RNA, 21 nt, Artificial Sequence
  LDLR targeting guide sequence portion
ggugaaugaguuuggucucgg

SEQ ID NO: 6031 - RNA, 21 nt, Artificial Sequence
  LDLR targeting guide sequence portion
ggugacagggcaaaggcuaac

SEQ ID NO: 6032 - RNA, 21 nt, Artificial Sequence
  LDLR targeting guide sequence portion
ggugaccagugacucaggcuc

SEQ ID NO: 6033 - RNA, 21 nt, Artificial Sequence
  LDLR targeting guide sequence portion
ggugcaggccacguguccuca

SEQ ID NO: 6034 - RNA, 21 nt, Artificial Sequence
  LDLR targeting guide sequence portion
ggugcaucagcagcccauggc

SEQ ID NO: 6035 - RNA, 21 nt, Artificial Sequence
  LDLR targeting guide sequence portion
ggugccaccacggauucagcc

SEQ ID NO: 6036 - RNA, 21 nt, Artificial Sequence
  LDLR targeting guide sequence portion
ggugccaucugcuguugugug

SEQ ID NO: 6037 - RNA, 21 nt, Artificial Sequence
  LDLR targeting guide sequence portion
ggugcccauccucccgacccc

SEQ ID NO: 6038 - RNA, 21 nt, Artificial Sequence
  LDLR targeting guide sequence portion
gguggagagaaacucaaaacu

SEQ ID NO: 6039 - RNA, 21 nt, Artificial Sequence
  LDLR targeting guide sequence portion
gguggaugaggcagggccagg

SEQ ID NO: 6040 - RNA, 21 nt, Artificial Sequence
  LDLR targeting guide sequence portion
gguggcaccgagaccaaacuc

SEQ ID NO: 6041 - RNA, 21 nt, Artificial Sequence
  LDLR targeting guide sequence portion
ggugggaggaugguuugagcu

SEQ ID NO: 6042 - RNA, 21 nt, Artificial Sequence
  LDLR targeting guide sequence portion
ggugggcggacauaaagacga

SEQ ID NO: 6043 - RNA, 21 nt, Artificial Sequence
  LDLR targeting guide sequence portion
ggugggucaugauucgggggu

SEQ ID NO: 6044 - RNA, 21 nt, Artificial Sequence
  LDLR targeting guide sequence portion
gguggguuuguaccuuccuua

SEQ ID NO: 6045 - RNA, 21 nt, Artificial Sequence
  LDLR targeting guide sequence portion
ggugucacuuuuuaaaccacu

SEQ ID NO: 6046 - RNA, 21 nt, Artificial Sequence
  LDLR targeting guide sequence portion
ggugucauccugguccccccg

SEQ ID NO: 6047 - RNA, 21 nt, Artificial Sequence
  LDLR targeting guide sequence portion
gguguccugacagccacaccu

SEQ ID NO: 6048 - RNA, 21 nt, Artificial Sequence
  LDLR targeting guide sequence portion
ggugucucaggcacuuaauaa

SEQ ID NO: 6049 - RNA, 21 nt, Artificial Sequence
  LDLR targeting guide sequence portion
gguguggcugucaggacacca

SEQ ID NO: 6050 - RNA, 21 nt, Artificial Sequence
  LDLR targeting guide sequence portion
gguuaccuuggccgugaggac

SEQ ID NO: 6051 - RNA, 21 nt, Artificial Sequence
  LDLR targeting guide sequence portion
gguuagccuuugcccugucac

SEQ ID NO: 6052 - RNA, 21 nt, Artificial Sequence
  LDLR targeting guide sequence portion
gguuauugccucugaaaugcc

SEQ ID NO: 6053 - RNA, 21 nt, Artificial Sequence
  LDLR targeting guide sequence portion
gguucugggcagggacgggac

SEQ ID NO: 6054 - RNA, 21 nt, Artificial Sequence
  LDLR targeting guide sequence portion
gguucuuucugaaaucgccgu

SEQ ID NO: 6055 - RNA, 21 nt, Artificial Sequence
  LDLR targeting guide sequence portion
gguugaccgggacuucaaagc

SEQ ID NO: 6056 - RNA, 21 nt, Artificial Sequence
  LDLR targeting guide sequence portion
gguugcuguauuuguucagug

SEQ ID NO: 6057 - RNA, 21 nt, Artificial Sequence
  LDLR targeting guide sequence portion
gguugggauuuugguuucuuc

SEQ ID NO: 6058 - RNA, 21 nt, Artificial Sequence
  LDLR targeting guide sequence portion
gguuuaaaaagugacacccau

SEQ ID NO: 6059 - RNA, 21 nt, Artificial Sequence
  LDLR targeting guide sequence portion
gguuucggagcacguaaaugc

SEQ ID NO: 6060 - RNA, 21 nt, Artificial Sequence
  LDLR targeting guide sequence portion
gguuucuuccuuuccucguga

SEQ ID NO: 6061 - RNA, 21 nt, Artificial Sequence
  LDLR targeting guide sequence portion
gguuugagcucaggcauuuga

SEQ ID NO: 6062 - RNA, 21 nt, Artificial Sequence
  LDLR targeting guide sequence portion
gguuuggcuuagagauuggug

SEQ ID NO: 6063 - RNA, 21 nt, Artificial Sequence
  LDLR targeting guide sequence portion
gguuuguaccuuccuuaagcc

SEQ ID NO: 6064 - RNA, 21 nt, Artificial Sequence
  LDLR targeting guide sequence portion
gguuuuuguagagaugggauc

SEQ ID NO: 6065 - RNA, 21 nt, Artificial Sequence
  LDLR targeting guide sequence portion
gguuuuuguagccugaauguc

SEQ ID NO: 6066 - RNA, 21 nt, Artificial Sequence
  LDLR targeting guide sequence portion
guaaacacguugacuccugag

SEQ ID NO: 6067 - RNA, 21 nt, Artificial Sequence
  LDLR targeting guide sequence portion
guaaaugcgucccuguacaga

SEQ ID NO: 6068 - RNA, 21 nt, Artificial Sequence
  LDLR targeting guide sequence portion
guaacacggcgauuucagaaa

SEQ ID NO: 6069 - RNA, 21 nt, Artificial Sequence
  LDLR targeting guide sequence portion
guaaccgggugucucaggcac

SEQ ID NO: 6070 - RNA, 21 nt, Artificial Sequence
  LDLR targeting guide sequence portion
guaagacauucaggcuacaaa

SEQ ID NO: 6071 - RNA, 21 nt, Artificial Sequence
  LDLR targeting guide sequence portion
guaagaccccaucucuuaaaa

SEQ ID NO: 6072 - RNA, 21 nt, Artificial Sequence
  LDLR targeting guide sequence portion
guacaaacccaccucgaaaga

SEQ ID NO: 6073 - RNA, 21 nt, Artificial Sequence
  LDLR targeting guide sequence portion
guacaaagauuauuugcacga

SEQ ID NO: 6074 - RNA, 21 nt, Artificial Sequence
  LDLR targeting guide sequence portion
guacaacucugaacugagaaa

SEQ ID NO: 6075 - RNA, 21 nt, Artificial Sequence
  LDLR targeting guide sequence portion
guacacaguguacaacucuga

SEQ ID NO: 6076 - RNA, 21 nt, Artificial Sequence
  LDLR targeting guide sequence portion
guacacuguguacauuuggca

SEQ ID NO: 6077 - RNA, 21 nt, Artificial Sequence
  LDLR targeting guide sequence portion
guacagauaguggggauuuuu

SEQ ID NO: 6078 - RNA, 21 nt, Artificial Sequence
  LDLR targeting guide sequence portion
guacagggacgcauuuacgug

SEQ ID NO: 6079 - RNA, 21 nt, Artificial Sequence
  LDLR targeting guide sequence portion
guacauaaagaagaggcauuu

SEQ ID NO: 6080 - RNA, 21 nt, Artificial Sequence
  LDLR targeting guide sequence portion
guacccagcugauuuuuaacu

SEQ ID NO: 6081 - RNA, 21 nt, Artificial Sequence
  LDLR targeting guide sequence portion
guaccuuccuuaagccaggaa

SEQ ID NO: 6082 - RNA, 21 nt, Artificial Sequence
  LDLR targeting guide sequence portion
guagccugaaugucuuacugu

SEQ ID NO: 6083 - RNA, 21 nt, Artificial Sequence
  LDLR targeting guide sequence portion
guaggggguuauugccucuga

SEQ ID NO: 6084 - RNA, 21 nt, Artificial Sequence
  LDLR targeting guide sequence portion
guaggggucgggaggaugggc

SEQ ID NO: 6085 - RNA, 21 nt, Artificial Sequence
  LDLR targeting guide sequence portion
guauagaagguuuuuguagcc

SEQ ID NO: 6086 - RNA, 21 nt, Artificial Sequence
  LDLR targeting guide sequence portion
guaugaguggcuucugggaga

SEQ ID NO: 6087 - RNA, 21 nt, Artificial Sequence
  LDLR targeting guide sequence portion
guauguaugaguggcuucugg

SEQ ID NO: 6088 - RNA, 21 nt, Artificial Sequence
  LDLR targeting guide sequence portion
guauguguuuaaaacaugcac

SEQ ID NO: 6089 - RNA, 21 nt, Artificial Sequence
  LDLR targeting guide sequence portion
guauuucugaaauagggucuu

SEQ ID NO: 6090 - RNA, 21 nt, Artificial Sequence
  LDLR targeting guide sequence portion
guauuuguucagugacuauuc

SEQ ID NO: 6091 - RNA, 21 nt, Artificial Sequence
  LDLR targeting guide sequence portion
gucaaacgauccagacuggag

SEQ ID NO: 6092 - RNA, 21 nt, Artificial Sequence
  LDLR targeting guide sequence portion
gucaaccugccccucucuguc

SEQ ID NO: 6093 - RNA, 21 nt, Artificial Sequence
  LDLR targeting guide sequence portion
gucaacguguuuaccucuucu

SEQ ID NO: 6094 - RNA, 21 nt, Artificial Sequence
  LDLR targeting guide sequence portion
gucaaugaaugccggggacag

SEQ ID NO: 6095 - RNA, 21 nt, Artificial Sequence
  LDLR targeting guide sequence portion
gucacaagggauuggcaauug

SEQ ID NO: 6096 - RNA, 21 nt, Artificial Sequence
  LDLR targeting guide sequence portion
gucacccccgaaucaugaccc

SEQ ID NO: 6097 - RNA, 21 nt, Artificial Sequence
  LDLR targeting guide sequence portion
gucacccuuaauauuuauuaa

SEQ ID NO: 6098 - RNA, 21 nt, Artificial Sequence
  LDLR targeting guide sequence portion
gucacgguggagagaaacuca

SEQ ID NO: 6099 - RNA, 21 nt, Artificial Sequence
  LDLR targeting guide sequence portion
gucacugaacaaauacagcaa

SEQ ID NO: 6100 - RNA, 21 nt, Artificial Sequence
  LDLR targeting guide sequence portion
gucacuggucacccuuaauau

SEQ ID NO: 6101 - RNA, 21 nt, Artificial Sequence
  LDLR targeting guide sequence portion
gucacugucucuccggacauc

SEQ ID NO: 6102 - RNA, 21 nt, Artificial Sequence
  LDLR targeting guide sequence portion
gucacuuuuuaaaccacugua

SEQ ID NO: 6103 - RNA, 21 nt, Artificial Sequence
  LDLR targeting guide sequence portion
gucagacucccgcgugaagau

SEQ ID NO: 6104 - RNA, 21 nt, Artificial Sequence
  LDLR targeting guide sequence portion
gucaggacaccagccuggugc

SEQ ID NO: 6105 - RNA, 21 nt, Artificial Sequence
  LDLR targeting guide sequence portion
gucaggcccagagaagcaagu

SEQ ID NO: 6106 - RNA, 21 nt, Artificial Sequence
  LDLR targeting guide sequence portion
gucagucuggaggaugacgug

SEQ ID NO: 6107 - RNA, 21 nt, Artificial Sequence
  LDLR targeting guide sequence portion
gucauccuccagacugaccau

SEQ ID NO: 6108 - RNA, 21 nt, Artificial Sequence
  LDLR targeting guide sequence portion
gucauccugguccccccgggc

SEQ ID NO: 6109 - RNA, 21 nt, Artificial Sequence
  LDLR targeting guide sequence portion
gucaugauucgggggugacag

SEQ ID NO: 6110 - RNA, 21 nt, Artificial Sequence
  LDLR targeting guide sequence portion
guccaguucgugcaaauaauc

SEQ ID NO: 6111 - RNA, 21 nt, Artificial Sequence
  LDLR targeting guide sequence portion
guccccagggacaaaacacug

SEQ ID NO: 6112 - RNA, 21 nt, Artificial Sequence
  LDLR targeting guide sequence portion
guccccccgggccuguuucuc

SEQ ID NO: 6113 - RNA, 21 nt, Artificial Sequence
  LDLR targeting guide sequence portion
guccccggcauucauugacac

SEQ ID NO: 6114 - RNA, 21 nt, Artificial Sequence
  LDLR targeting guide sequence portion
guccccguuguauguaugagu

SEQ ID NO: 6115 - RNA, 21 nt, Artificial Sequence
  LDLR targeting guide sequence portion
gucccggucaaccugccccuc

SEQ ID NO: 6116 - RNA, 21 nt, Artificial Sequence
  LDLR targeting guide sequence portion
gucccgucaaacgauccagac

SEQ ID NO: 6117 - RNA, 21 nt, Artificial Sequence
  LDLR targeting guide sequence portion
gucccgucccugcccagaacc

SEQ ID NO: 6118 - RNA, 21 nt, Artificial Sequence
  LDLR targeting guide sequence portion
gucccguuggugccaucugcu

SEQ ID NO: 6119 - RNA, 21 nt, Artificial Sequence
  LDLR targeting guide sequence portion
gucccugcccagaacccuucc

SEQ ID NO: 6120 - RNA, 21 nt, Artificial Sequence
  LDLR targeting guide sequence portion
gucccuggggacaauugccaa

SEQ ID NO: 6121 - RNA, 21 nt, Artificial Sequence
  LDLR targeting guide sequence portion
gucccuguacagauagugggg

SEQ ID NO: 6122 - RNA, 21 nt, Artificial Sequence
  LDLR targeting guide sequence portion
guccgaagccuguucugccuc

SEQ ID NO: 6123 - RNA, 21 nt, Artificial Sequence
  LDLR targeting guide sequence portion
guccgcccaccuagugcuucc

SEQ ID NO: 6124 - RNA, 21 nt, Artificial Sequence
  LDLR targeting guide sequence portion
guccggagagacagugacagc

SEQ ID NO: 6125 - RNA, 21 nt, Artificial Sequence
  LDLR targeting guide sequence portion
guccucacggccaagguaacc

SEQ ID NO: 6126 - RNA, 21 nt, Artificial Sequence
  LDLR targeting guide sequence portion
guccugacagccacaccuggg

SEQ ID NO: 6127 - RNA, 21 nt, Artificial Sequence
  LDLR targeting guide sequence portion
gucggaaaugaucuggcugaa

SEQ ID NO: 6128 - RNA, 21 nt, Artificial Sequence
  LDLR targeting guide sequence portion
gucgggaggaugggcaccagg

SEQ ID NO: 6129 - RNA, 21 nt, Artificial Sequence
  LDLR targeting guide sequence portion
gucgucuuuauguccgcccac

SEQ ID NO: 6130 - RNA, 21 nt, Artificial Sequence
  LDLR targeting guide sequence portion
gucgugagcuaugauuaugcc

SEQ ID NO: 6131 - RNA, 21 nt, Artificial Sequence
  LDLR targeting guide sequence portion
gucguguguguugggauggga

SEQ ID NO: 6132 - RNA, 21 nt, Artificial Sequence
  LDLR targeting guide sequence portion
gucguugauggguauguguuu

SEQ ID NO: 6133 - RNA, 21 nt, Artificial Sequence
  LDLR targeting guide sequence portion
gucuagcaaggcuugcauaga

SEQ ID NO: 6134 - RNA, 21 nt, Artificial Sequence
  LDLR targeting guide sequence portion
gucucaggaaggguucugggc

SEQ ID NO: 6135 - RNA, 21 nt, Artificial Sequence
  LDLR targeting guide sequence portion
gucucaggcacuuaauaaaua

SEQ ID NO: 6136 - RNA, 21 nt, Artificial Sequence
  LDLR targeting guide sequence portion
gucuccuugcacuuucucagu

SEQ ID NO: 6137 - RNA, 21 nt, Artificial Sequence
  LDLR targeting guide sequence portion
gucucggugccaccacggauu

SEQ ID NO: 6138 - RNA, 21 nt, Artificial Sequence
  LDLR targeting guide sequence portion
gucucuccggacaucagugca

SEQ ID NO: 6139 - RNA, 21 nt, Artificial Sequence
  LDLR targeting guide sequence portion
gucugacggaggcugucacug

SEQ ID NO: 6140 - RNA, 21 nt, Artificial Sequence
  LDLR targeting guide sequence portion
gucuggaggaugacguggcgu

SEQ ID NO: 6141 - RNA, 21 nt, Artificial Sequence
  LDLR targeting guide sequence portion
gucuggaucguuugacgggac

SEQ ID NO: 6142 - RNA, 21 nt, Artificial Sequence
  LDLR targeting guide sequence portion
gucuggccaaauucauuuuuu

SEQ ID NO: 6143 - RNA, 21 nt, Artificial Sequence
  LDLR targeting guide sequence portion
gucuucucugucuuugaauaa

SEQ ID NO: 6144 - RNA, 21 nt, Artificial Sequence
  LDLR targeting guide sequence portion
gucuuuauguccgcccaccua

SEQ ID NO: 6145 - RNA, 21 nt, Artificial Sequence
  LDLR targeting guide sequence portion
gucuuucgagguggguuugua

SEQ ID NO: 6146 - RNA, 21 nt, Artificial Sequence
  LDLR targeting guide sequence portion
gucuuugaauaaaacaaggcc

SEQ ID NO: 6147 - RNA, 21 nt, Artificial Sequence
  LDLR targeting guide sequence portion
gugaacaucugccuggagucc

SEQ ID NO: 6148 - RNA, 21 nt, Artificial Sequence
  LDLR targeting guide sequence portion
gugaagaugucacaagggauu

SEQ ID NO: 6149 - RNA, 21 nt, Artificial Sequence
  LDLR targeting guide sequence portion
gugaaggauaagagaaacagg

SEQ ID NO: 6150 - RNA, 21 nt, Artificial Sequence
  LDLR targeting guide sequence portion
gugaauaucgagaacugccau

SEQ ID NO: 6151 - RNA, 21 nt, Artificial Sequence
  LDLR targeting guide sequence portion
gugaaugaguuuggucucggu

SEQ ID NO: 6152 - RNA, 21 nt, Artificial Sequence
  LDLR targeting guide sequence portion
gugaauggcuuggaggcauuu

SEQ ID NO: 6153 - RNA, 21 nt, Artificial Sequence
  LDLR targeting guide sequence portion
gugacacaauccucaaacaug

SEQ ID NO: 6154 - RNA, 21 nt, Artificial Sequence
  LDLR targeting guide sequence portion
gugacacccaucucccagaag

SEQ ID NO: 6155 - RNA, 21 nt, Artificial Sequence
  LDLR targeting guide sequence portion
gugacagccuccgucagacuc

SEQ ID NO: 6156 - RNA, 21 nt, Artificial Sequence
  LDLR targeting guide sequence portion
gugacagggcaaaggcuaacc

SEQ ID NO: 6157 - RNA, 21 nt, Artificial Sequence
  LDLR targeting guide sequence portion
gugacaucuucacgcgggagu

SEQ ID NO: 6158 - RNA, 21 nt, Artificial Sequence
  LDLR targeting guide sequence portion
gugaccagugacucaggcucu

SEQ ID NO: 6159 - RNA, 21 nt, Artificial Sequence
  LDLR targeting guide sequence portion
gugacuauucucggggcccug

SEQ ID NO: 6160 - RNA, 21 nt, Artificial Sequence
  LDLR targeting guide sequence portion
gugacucaggcucugccucug

SEQ ID NO: 6161 - RNA, 21 nt, Artificial Sequence
  LDLR targeting guide sequence portion
gugagccacugcgcccggccu

SEQ ID NO: 6162 - RNA, 21 nt, Artificial Sequence
  LDLR targeting guide sequence portion
gugagcuaugauuaugccacu

SEQ ID NO: 6163 - RNA, 21 nt, Artificial Sequence
  LDLR targeting guide sequence portion
gugaggacacguggccugcac

SEQ ID NO: 6164 - RNA, 21 nt, Artificial Sequence
  LDLR targeting guide sequence portion
gugaggcaccugugucuggcc

SEQ ID NO: 6165 - RNA, 21 nt, Artificial Sequence
  LDLR targeting guide sequence portion
gugauaagccuuucugguuuc

SEQ ID NO: 6166 - RNA, 21 nt, Artificial Sequence
  LDLR targeting guide sequence portion
gugauccagcucagccuccca

SEQ ID NO: 6167 - RNA, 21 nt, Artificial Sequence
  LDLR targeting guide sequence portion
gugaucgugaauaucgagaac

SEQ ID NO: 6168 - RNA, 21 nt, Artificial Sequence
  LDLR targeting guide sequence portion
gugcaaacauaacaaaaaauc

SEQ ID NO: 6169 - RNA, 21 nt, Artificial Sequence
  LDLR targeting guide sequence portion
gugcaacaguaacacggcgau

SEQ ID NO: 6170 - RNA, 21 nt, Artificial Sequence
  LDLR targeting guide sequence portion
gugcaacgcuuuuugggagaa

SEQ ID NO: 6171 - RNA, 21 nt, Artificial Sequence
  LDLR targeting guide sequence portion
gugcaaggagaccacgggaau

SEQ ID NO: 6172 - RNA, 21 nt, Artificial Sequence
  LDLR targeting guide sequence portion
gugcaggccacguguccucac

SEQ ID NO: 6173 - RNA, 21 nt, Artificial Sequence
  LDLR targeting guide sequence portion
gugcagggaaccgugauaagc

SEQ ID NO: 6174 - RNA, 21 nt, Artificial Sequence
  LDLR targeting guide sequence portion
gugcaucagcagcccauggcc

SEQ ID NO: 6175 - RNA, 21 nt, Artificial Sequence
  LDLR targeting guide sequence portion
gugcauguuuuaaacacauac

SEQ ID NO: 6176 - RNA, 21 nt, Artificial Sequence
  LDLR targeting guide sequence portion
gugccaccacggauucagcca

SEQ ID NO: 6177 - RNA, 21 nt, Artificial Sequence
  LDLR targeting guide sequence portion
gugccaccguacccagcugau

SEQ ID NO: 6178 - RNA, 21 nt, Artificial Sequence
  LDLR targeting guide sequence portion
gugccaucugcuguugugugu

SEQ ID NO: 6179 - RNA, 21 nt, Artificial Sequence
  LDLR targeting guide sequence portion
gugcccauccucccgaccccu

SEQ ID NO: 6180 - RNA, 21 nt, Artificial Sequence
  LDLR targeting guide sequence portion
gugcccaugcaauggcuuggg

SEQ ID NO: 6181 - RNA, 21 nt, Artificial Sequence
  LDLR targeting guide sequence portion
gugccugagacacccgguuac

SEQ ID NO: 6182 - RNA, 21 nt, Artificial Sequence
  LDLR targeting guide sequence portion
gugcuccgaaaccagaaaggc

SEQ ID NO: 6183 - RNA, 21 nt, Artificial Sequence
  LDLR targeting guide sequence portion
gugcuuccacuucuaugcaaa

SEQ ID NO: 6184 - RNA, 21 nt, Artificial Sequence
  LDLR targeting guide sequence portion
guggaagcacuaggugggcgg

SEQ ID NO: 6185 - RNA, 21 nt, Artificial Sequence
  LDLR targeting guide sequence portion
guggagagaaacucaaaacuu

SEQ ID NO: 6186 - RNA, 21 nt, Artificial Sequence
  LDLR targeting guide sequence portion
guggagguugcagugagccau

SEQ ID NO: 6187 - RNA, 21 nt, Artificial Sequence
  LDLR targeting guide sequence portion
guggaugaggcagggccaggg

SEQ ID NO: 6188 - RNA, 21 nt, Artificial Sequence
  LDLR targeting guide sequence portion
guggcaccgagaccaaacuca

SEQ ID NO: 6189 - RNA, 21 nt, Artificial Sequence
  LDLR targeting guide sequence portion
guggcaucauuuggugaauga

SEQ ID NO: 6190 - RNA, 21 nt, Artificial Sequence
  LDLR targeting guide sequence portion
guggccugcacccaggugugg

SEQ ID NO: 6191 - RNA, 21 nt, Artificial Sequence
  LDLR targeting guide sequence portion
guggcgugaacaucugccugg

SEQ ID NO: 6192 - RNA, 21 nt, Artificial Sequence
  LDLR targeting guide sequence portion
guggcugucaggacaccagcc

SEQ ID NO: 6193 - RNA, 21 nt, Artificial Sequence
  LDLR targeting guide sequence portion
guggcuucugggagaugggug

SEQ ID NO: 6194 - RNA, 21 nt, Artificial Sequence
  LDLR targeting guide sequence portion
guggcuuucaacacacaacag

SEQ ID NO: 6195 - RNA, 21 nt, Artificial Sequence
  LDLR targeting guide sequence portion
gugggaggaugguuugagcuc

SEQ ID NO: 6196 - RNA, 21 nt, Artificial Sequence
  LDLR targeting guide sequence portion
gugggcggacauaaagacgac

SEQ ID NO: 6197 - RNA, 21 nt, Artificial Sequence
  LDLR targeting guide sequence portion
guggggauuuuuuguuauguu

SEQ ID NO: 6198 - RNA, 21 nt, Artificial Sequence
  LDLR targeting guide sequence portion
guggguaggggucgggaggau

SEQ ID NO: 6199 - RNA, 21 nt, Artificial Sequence
  LDLR targeting guide sequence portion
gugggucaugauucgggggug

SEQ ID NO: 6200 - RNA, 21 nt, Artificial Sequence
  LDLR targeting guide sequence portion
guggguuuguaccuuccuuaa

SEQ ID NO: 6201 - RNA, 21 nt, Artificial Sequence
  LDLR targeting guide sequence portion
guggucuccuugcacuuucuc

SEQ ID NO: 6202 - RNA, 21 nt, Artificial Sequence
  LDLR targeting guide sequence portion
gugguggcaccgagaccaaac

SEQ ID NO: 6203 - RNA, 21 nt, Artificial Sequence
  LDLR targeting guide sequence portion
gugguuuaaaaagugacaccc

SEQ ID NO: 6204 - RNA, 21 nt, Artificial Sequence
  LDLR targeting guide sequence portion
guguacaacucugaacugaga

SEQ ID NO: 6205 - RNA, 21 nt, Artificial Sequence
  LDLR targeting guide sequence portion
guguaggggguuauugccucu

SEQ ID NO: 6206 - RNA, 21 nt, Artificial Sequence
  LDLR targeting guide sequence portion
gugucaaugaaugccggggac

SEQ ID NO: 6207 - RNA, 21 nt, Artificial Sequence
  LDLR targeting guide sequence portion
gugucacgguggagagaaacu

SEQ ID NO: 6208 - RNA, 21 nt, Artificial Sequence
  LDLR targeting guide sequence portion
gugucacuuuuuaaaccacug

SEQ ID NO: 6209 - RNA, 21 nt, Artificial Sequence
  LDLR targeting guide sequence portion
gugucauccugguccccccgg

SEQ ID NO: 6210 - RNA, 21 nt, Artificial Sequence
  LDLR targeting guide sequence portion
guguccucacggccaagguaa

SEQ ID NO: 6211 - RNA, 21 nt, Artificial Sequence
  LDLR targeting guide sequence portion
guguccugacagccacaccug

SEQ ID NO: 6212 - RNA, 21 nt, Artificial Sequence
  LDLR targeting guide sequence portion
gugucuggccaaauucauuuu

SEQ ID NO: 6213 - RNA, 21 nt, Artificial Sequence
  LDLR targeting guide sequence portion
gugucuuucgagguggguuug

SEQ ID NO: 6214 - RNA, 21 nt, Artificial Sequence
  LDLR targeting guide sequence portion
gugugcaacgcuuuuugggag

SEQ ID NO: 6215 - RNA, 21 nt, Artificial Sequence
  LDLR targeting guide sequence portion
guguggcugucaggacaccag

SEQ ID NO: 6216 - RNA, 21 nt, Artificial Sequence
  LDLR targeting guide sequence portion
guguguguugggaugggaucc

SEQ ID NO: 6217 - RNA, 21 nt, Artificial Sequence
  LDLR targeting guide sequence portion
guguguugaaagccacuugcu

SEQ ID NO: 6218 - RNA, 21 nt, Artificial Sequence
  LDLR targeting guide sequence portion
guguguugggaugggauccca

SEQ ID NO: 6219 - RNA, 21 nt, Artificial Sequence
  LDLR targeting guide sequence portion
guguuacuguugcacugaugu

SEQ ID NO: 6220 - RNA, 21 nt, Artificial Sequence
  LDLR targeting guide sequence portion
guguugaaagccacuugcuuc

SEQ ID NO: 6221 - RNA, 21 nt, Artificial Sequence
  LDLR targeting guide sequence portion
guguugggaugggaucccagg

SEQ ID NO: 6222 - RNA, 21 nt, Artificial Sequence
  LDLR targeting guide sequence portion
guguuuaaaacaugcacggug

SEQ ID NO: 6223 - RNA, 21 nt, Artificial Sequence
  LDLR targeting guide sequence portion
guguuuaccucuucuaugcaa

SEQ ID NO: 6224 - RNA, 21 nt, Artificial Sequence
  LDLR targeting guide sequence portion
guguuuugucccuggggacaa

SEQ ID NO: 6225 - RNA, 21 nt, Artificial Sequence
  LDLR targeting guide sequence portion
guuaaaaaucagcuggguacg

SEQ ID NO: 6226 - RNA, 21 nt, Artificial Sequence
  LDLR targeting guide sequence portion
guuaccuuggccgugaggaca

SEQ ID NO: 6227 - RNA, 21 nt, Artificial Sequence
  LDLR targeting guide sequence portion
guuacuguugcacugaugucc

SEQ ID NO: 6228 - RNA, 21 nt, Artificial Sequence
  LDLR targeting guide sequence portion
guuagccuuugcccugucacc

SEQ ID NO: 6229 - RNA, 21 nt, Artificial Sequence
  LDLR targeting guide sequence portion
guuauuauuuugcacuguuuu

SEQ ID NO: 6230 - RNA, 21 nt, Artificial Sequence
  LDLR targeting guide sequence portion
guuauugccucugaaaugccu

SEQ ID NO: 6231 - RNA, 21 nt, Artificial Sequence
  LDLR targeting guide sequence portion
guucacgccacgucauccucc

SEQ ID NO: 6232 - RNA, 21 nt, Artificial Sequence
  LDLR targeting guide sequence portion
guucagaguuguacacugugu

SEQ ID NO: 6233 - RNA, 21 nt, Artificial Sequence
  LDLR targeting guide sequence portion
guucaggaguuggagaccagg

SEQ ID NO: 6234 - RNA, 21 nt, Artificial Sequence
  LDLR targeting guide sequence portion
guucagugacuauucucgggg

SEQ ID NO: 6235 - RNA, 21 nt, Artificial Sequence
  LDLR targeting guide sequence portion
guucucgauauucacgaucac

SEQ ID NO: 6236 - RNA, 21 nt, Artificial Sequence
  LDLR targeting guide sequence portion
guucugccucccagaugaaua

SEQ ID NO: 6237 - RNA, 21 nt, Artificial Sequence
  LDLR targeting guide sequence portion
guucugggcagggacgggacu

SEQ ID NO: 6238 - RNA, 21 nt, Artificial Sequence
  LDLR targeting guide sequence portion
guucuuucugaaaucgccgug

SEQ ID NO: 6239 - RNA, 21 nt, Artificial Sequence
  LDLR targeting guide sequence portion
guugaaagccacuugcuucuc

SEQ ID NO: 6240 - RNA, 21 nt, Artificial Sequence
  LDLR targeting guide sequence portion
guugaccgggacuucaaagcc

SEQ ID NO: 6241 - RNA, 21 nt, Artificial Sequence
  LDLR targeting guide sequence portion
guugacuccugaguuuagggg

SEQ ID NO: 6242 - RNA, 21 nt, Artificial Sequence
  LDLR targeting guide sequence portion
guugauggguauguguuuaaa

SEQ ID NO: 6243 - RNA, 21 nt, Artificial Sequence
  LDLR targeting guide sequence portion
guugcacacaguccaguucgu

SEQ ID NO: 6244 - RNA, 21 nt, Artificial Sequence
  LDLR targeting guide sequence portion
guugcacugauguccggagag

SEQ ID NO: 6245 - RNA, 21 nt, Artificial Sequence
  LDLR targeting guide sequence portion
guugcucaggccuggucucca

SEQ ID NO: 6246 - RNA, 21 nt, Artificial Sequence
  LDLR targeting guide sequence portion
guugcuguauuuguucaguga

SEQ ID NO: 6247 - RNA, 21 nt, Artificial Sequence
  LDLR targeting guide sequence portion
guuggagaccaggccugagca

SEQ ID NO: 6248 - RNA, 21 nt, Artificial Sequence
  LDLR targeting guide sequence portion
guugggaugggaucccaggcc

SEQ ID NO: 6249 - RNA, 21 nt, Artificial Sequence
  LDLR targeting guide sequence portion
guugggauuuugguuucuucc

SEQ ID NO: 6250 - RNA, 21 nt, Artificial Sequence
  LDLR targeting guide sequence portion
guuggugccaucugcuguugu

SEQ ID NO: 6251 - RNA, 21 nt, Artificial Sequence
  LDLR targeting guide sequence portion
guuguacacuguguacauuug

SEQ ID NO: 6252 - RNA, 21 nt, Artificial Sequence
  LDLR targeting guide sequence portion
guuguauguaugaguggcuuc

SEQ ID NO: 6253 - RNA, 21 nt, Artificial Sequence
  LDLR targeting guide sequence portion
guuguauuucugaaauagggu

SEQ ID NO: 6254 - RNA, 21 nt, Artificial Sequence
  LDLR targeting guide sequence portion
guuguguguugaaagccacuu

SEQ ID NO: 6255 - RNA, 21 nt, Artificial Sequence
  LDLR targeting guide sequence portion
guuuaaaaagugacacccauc

SEQ ID NO: 6256 - RNA, 21 nt, Artificial Sequence
  LDLR targeting guide sequence portion
guuuaaaacaugcacggugag

SEQ ID NO: 6257 - RNA, 21 nt, Artificial Sequence
  LDLR targeting guide sequence portion
guuuaccucuucuaugcaagc

SEQ ID NO: 6258 - RNA, 21 nt, Artificial Sequence
  LDLR targeting guide sequence portion
guuuagggguuuggcuuagag

SEQ ID NO: 6259 - RNA, 21 nt, Artificial Sequence
  LDLR targeting guide sequence portion
guuucaaccaauauacaaagu

SEQ ID NO: 6260 - RNA, 21 nt, Artificial Sequence
  LDLR targeting guide sequence portion
guuucggagcacguaaaugcg

SEQ ID NO: 6261 - RNA, 21 nt, Artificial Sequence
  LDLR targeting guide sequence portion
guuucucuccaccgugacaca

SEQ ID NO: 6262 - RNA, 21 nt, Artificial Sequence
  LDLR targeting guide sequence portion
guuucucuuauccuucacgag

SEQ ID NO: 6263 - RNA, 21 nt, Artificial Sequence
  LDLR targeting guide sequence portion
guuucuuccuuuccucgugaa

SEQ ID NO: 6264 - RNA, 21 nt, Artificial Sequence
  LDLR targeting guide sequence portion
guuugacgggacuucagguuc

SEQ ID NO: 6265 - RNA, 21 nt, Artificial Sequence
  LDLR targeting guide sequence portion
guuugagcucaggcauuugag

SEQ ID NO: 6266 - RNA, 21 nt, Artificial Sequence
  LDLR targeting guide sequence portion
guuugaggauugugucacggu

SEQ ID NO: 6267 - RNA, 21 nt, Artificial Sequence
  LDLR targeting guide sequence portion
guuugcacuuuguauauuggu

SEQ ID NO: 6268 - RNA, 21 nt, Artificial Sequence
  LDLR targeting guide sequence portion
guuuggcuuagagauuggugg

SEQ ID NO: 6269 - RNA, 21 nt, Artificial Sequence
  LDLR targeting guide sequence portion
guuuggucucggugccaccac

SEQ ID NO: 6270 - RNA, 21 nt, Artificial Sequence
  LDLR targeting guide sequence portion
guuuguaccuuccuuaagcca

SEQ ID NO: 6271 - RNA, 21 nt, Artificial Sequence
  LDLR targeting guide sequence portion
guuuuaaacacauacccauca

SEQ ID NO: 6272 - RNA, 21 nt, Artificial Sequence
  LDLR targeting guide sequence portion
guuuuauucaaagacagagaa

SEQ ID NO: 6273 - RNA, 21 nt, Artificial Sequence
  LDLR targeting guide sequence portion
guuuucugucguguguguugg

SEQ ID NO: 6274 - RNA, 21 nt, Artificial Sequence
  LDLR targeting guide sequence portion
guuuugaguuucucuccaccg

SEQ ID NO: 6275 - RNA, 21 nt, Artificial Sequence
  LDLR targeting guide sequence portion
guuuugucccuggggacaauu

SEQ ID NO: 6276 - RNA, 21 nt, Artificial Sequence
  LDLR targeting guide sequence portion
guuuuuguagagaugggaucu

SEQ ID NO: 6277 - RNA, 21 nt, Artificial Sequence
  LDLR targeting guide sequence portion
guuuuuguagccugaaugucu

SEQ ID NO: 6278 - RNA, 21 nt, Artificial Sequence
  LDLR targeting guide sequence portion
uaaaaaaugaauuuggccaga

SEQ ID NO: 6279 - RNA, 21 nt, Artificial Sequence
  LDLR targeting guide sequence portion
uaaaaagugacacccaucucc

SEQ ID NO: 6280 - RNA, 21 nt, Artificial Sequence
  LDLR targeting guide sequence portion
uaaaaaucagcuggguacggu

SEQ ID NO: 6281 - RNA, 21 nt, Artificial Sequence
  LDLR targeting guide sequence portion
uaaaacaaagcucuggcaggc

SEQ ID NO: 6282 - RNA, 21 nt, Artificial Sequence
  LDLR targeting guide sequence portion
uaaaacaaggccggcgagguc

SEQ ID NO: 6283 - RNA, 21 nt, Artificial Sequence
  LDLR targeting guide sequence portion
uaaaacaugcacggugaggcc

SEQ ID NO: 6284 - RNA, 21 nt, Artificial Sequence
  LDLR targeting guide sequence portion
uaaacacauacccaucaacga

SEQ ID NO: 6285 - RNA, 21 nt, Artificial Sequence
  LDLR targeting guide sequence portion
uaaacacguugacuccugagu

SEQ ID NO: 6286 - RNA, 21 nt, Artificial Sequence
  LDLR targeting guide sequence portion
uaaacucaggagucaacgugu

SEQ ID NO: 6287 - RNA, 21 nt, Artificial Sequence
  LDLR targeting guide sequence portion
uaaagaagaggcauuucagag

SEQ ID NO: 6288 - RNA, 21 nt, Artificial Sequence
  LDLR targeting guide sequence portion
uaaagacgacaauggcaguuc

SEQ ID NO: 6289 - RNA, 21 nt, Artificial Sequence
  LDLR targeting guide sequence portion
uaaauaaauccuccagucugg

SEQ ID NO: 6290 - RNA, 21 nt, Artificial Sequence
  LDLR targeting guide sequence portion
uaaauauuaagggugaccagu

SEQ ID NO: 6291 - RNA, 21 nt, Artificial Sequence
  LDLR targeting guide sequence portion
uaaauccuccagucuggaucg

SEQ ID NO: 6292 - RNA, 21 nt, Artificial Sequence
  LDLR targeting guide sequence portion
uaaaugcgucccuguacagau

SEQ ID NO: 6293 - RNA, 21 nt, Artificial Sequence
  LDLR targeting guide sequence portion
uaacaaaaaauccccacuauc

SEQ ID NO: 6294 - RNA, 21 nt, Artificial Sequence
  LDLR targeting guide sequence portion
uaacacaaaugccaaauguac

SEQ ID NO: 6295 - RNA, 21 nt, Artificial Sequence
  LDLR targeting guide sequence portion
uaacacggcgauuucagaaag

SEQ ID NO: 6296 - RNA, 21 nt, Artificial Sequence
  LDLR targeting guide sequence portion
uaacccccuacacagggcccc

SEQ ID NO: 6297 - RNA, 21 nt, Artificial Sequence
  LDLR targeting guide sequence portion
uaaccgggugucucaggcacu

SEQ ID NO: 6298 - RNA, 21 nt, Artificial Sequence
  LDLR targeting guide sequence portion
uaaccuggcugucuagcaagg

SEQ ID NO: 6299 - RNA, 21 nt, Artificial Sequence
  LDLR targeting guide sequence portion
uaacuuuuugguuuuuguaga

SEQ ID NO: 6300 - RNA, 21 nt, Artificial Sequence
  LDLR targeting guide sequence portion
uaagacauucaggcuacaaaa

SEQ ID NO: 6301 - RNA, 21 nt, Artificial Sequence
  LDLR targeting guide sequence portion
uaagagaaacaggcccggggg

SEQ ID NO: 6302 - RNA, 21 nt, Artificial Sequence
  LDLR targeting guide sequence portion
uaagccaaaccccuaaacuca

SEQ ID NO: 6303 - RNA, 21 nt, Artificial Sequence
  LDLR targeting guide sequence portion
uaagccaggaaagggauucau

SEQ ID NO: 6304 - RNA, 21 nt, Artificial Sequence
  LDLR targeting guide sequence portion
uaagccuuucugguuucggag

SEQ ID NO: 6305 - RNA, 21 nt, Artificial Sequence
  LDLR targeting guide sequence portion
uaagggugaccagugacucag

SEQ ID NO: 6306 - RNA, 21 nt, Artificial Sequence
  LDLR targeting guide sequence portion
uaagugccugagacacccggu

SEQ ID NO: 6307 - RNA, 21 nt, Artificial Sequence
  LDLR targeting guide sequence portion
uaauaaauauuaagggugacc

SEQ ID NO: 6308 - RNA, 21 nt, Artificial Sequence
  LDLR targeting guide sequence portion
uaauauuuauuaagugccuga

SEQ ID NO: 6309 - RNA, 21 nt, Artificial Sequence
  LDLR targeting guide sequence portion
uaaucauagcucacgacagcc

SEQ ID NO: 6310 - RNA, 21 nt, Artificial Sequence
  LDLR targeting guide sequence portion
uaauugaucacaguaagacau

SEQ ID NO: 6311 - RNA, 21 nt, Artificial Sequence
  LDLR targeting guide sequence portion
uacaaacccaccucgaaagac

SEQ ID NO: 6312 - RNA, 21 nt, Artificial Sequence
  LDLR targeting guide sequence portion
uacaaagauuauuugcacgaa

SEQ ID NO: 6313 - RNA, 21 nt, Artificial Sequence
  LDLR targeting guide sequence portion
uacaacggggacaucauucuc

SEQ ID NO: 6314 - RNA, 21 nt, Artificial Sequence
  LDLR targeting guide sequence portion
uacaacucugaacugagaaag

SEQ ID NO: 6315 - RNA, 21 nt, Artificial Sequence
  LDLR targeting guide sequence portion
uacacagggccccgagaauag

SEQ ID NO: 6316 - RNA, 21 nt, Artificial Sequence
  LDLR targeting guide sequence portion
uacacaguguacaacucugaa

SEQ ID NO: 6317 - RNA, 21 nt, Artificial Sequence
  LDLR targeting guide sequence portion
uacacuguguacauuuggcau

SEQ ID NO: 6318 - RNA, 21 nt, Artificial Sequence
  LDLR targeting guide sequence portion
uacagauaguggggauuuuuu

SEQ ID NO: 6319 - RNA, 21 nt, Artificial Sequence
  LDLR targeting guide sequence portion
uacagcaaccaggguuugcaa

SEQ ID NO: 6320 - RNA, 21 nt, Artificial Sequence
  LDLR targeting guide sequence portion
uacaggcgugaggcaccugug

SEQ ID NO: 6321 - RNA, 21 nt, Artificial Sequence
  LDLR targeting guide sequence portion
uacagggacgcauuuacgugc

SEQ ID NO: 6322 - RNA, 21 nt, Artificial Sequence
  LDLR targeting guide sequence portion
uacagugguuuaaaaagugac

SEQ ID NO: 6323 - RNA, 21 nt, Artificial Sequence
  LDLR targeting guide sequence portion
uacauaaagaagaggcauuuc

SEQ ID NO: 6324 - RNA, 21 nt, Artificial Sequence
  LDLR targeting guide sequence portion
uacauacaacggggacaucau

SEQ ID NO: 6325 - RNA, 21 nt, Artificial Sequence
  LDLR targeting guide sequence portion
uacccacuuccauucccgugg

SEQ ID NO: 6326 - RNA, 21 nt, Artificial Sequence
  LDLR targeting guide sequence portion
uacccagcugauuuuuaacuu

SEQ ID NO: 6327 - RNA, 21 nt, Artificial Sequence
  LDLR targeting guide sequence portion
uacccaucaacgacaagauug

SEQ ID NO: 6328 - RNA, 21 nt, Artificial Sequence
  LDLR targeting guide sequence portion
uaccucuucuaugcaagccuu

SEQ ID NO: 6329 - RNA, 21 nt, Artificial Sequence
  LDLR targeting guide sequence portion
uaccuuccuuaagccaggaaa

SEQ ID NO: 6330 - RNA, 21 nt, Artificial Sequence
  LDLR targeting guide sequence portion
uaccuuggccgugaggacacg

SEQ ID NO: 6331 - RNA, 21 nt, Artificial Sequence
  LDLR targeting guide sequence portion
uacgugcuccgaaaccagaaa

SEQ ID NO: 6332 - RNA, 21 nt, Artificial Sequence
  LDLR targeting guide sequence portion
uacuauguugcccaggcugga

SEQ ID NO: 6333 - RNA, 21 nt, Artificial Sequence
  LDLR targeting guide sequence portion
uacuguugcacugauguccgg

SEQ ID NO: 6334 - RNA, 21 nt, Artificial Sequence
  LDLR targeting guide sequence portion
uagaagagguaaacacguuga

SEQ ID NO: 6335 - RNA, 21 nt, Artificial Sequence
  LDLR targeting guide sequence portion
uagaagguuuuuguagccuga

SEQ ID NO: 6336 - RNA, 21 nt, Artificial Sequence
  LDLR targeting guide sequence portion
uagaaguggaagcacuaggug

SEQ ID NO: 6337 - RNA, 21 nt, Artificial Sequence
  LDLR targeting guide sequence portion
uagacagccagguuagccuuu

SEQ ID NO: 6338 - RNA, 21 nt, Artificial Sequence
  LDLR targeting guide sequence portion
uagagaugggaucucgcuuug

SEQ ID NO: 6339 - RNA, 21 nt, Artificial Sequence
  LDLR targeting guide sequence portion
uagagauugguggaugaggca

SEQ ID NO: 6340 - RNA, 21 nt, Artificial Sequence
  LDLR targeting guide sequence portion
uagcaaggcuugcauagaaga

SEQ ID NO: 6341 - RNA, 21 nt, Artificial Sequence
  LDLR targeting guide sequence portion
uagccugaaugucuuacugug

SEQ ID NO: 6342 - RNA, 21 nt, Artificial Sequence
  LDLR targeting guide sequence portion
uagccuuugcccugucacccc

SEQ ID NO: 6343 - RNA, 21 nt, Artificial Sequence
  LDLR targeting guide sequence portion
uagcucacgacagccucaaau

SEQ ID NO: 6344 - RNA, 21 nt, Artificial Sequence
  LDLR targeting guide sequence portion
uaggggguuauugccucugaa

SEQ ID NO: 6345 - RNA, 21 nt, Artificial Sequence
  LDLR targeting guide sequence portion
uaggggucgggaggaugggca

SEQ ID NO: 6346 - RNA, 21 nt, Artificial Sequence
  LDLR targeting guide sequence portion
uagggguuuggcuuagagauu

SEQ ID NO: 6347 - RNA, 21 nt, Artificial Sequence
  LDLR targeting guide sequence portion
uaggugggcggacauaaagac

SEQ ID NO: 6348 - RNA, 21 nt, Artificial Sequence
  LDLR targeting guide sequence portion
uaguaagaccccaucucuuaa

SEQ ID NO: 6349 - RNA, 21 nt, Artificial Sequence
  LDLR targeting guide sequence portion
uagucacugaacaaauacagc

SEQ ID NO: 6350 - RNA, 21 nt, Artificial Sequence
  LDLR targeting guide sequence portion
uagugcuuccacuucuaugca

SEQ ID NO: 6351 - RNA, 21 nt, Artificial Sequence
  LDLR targeting guide sequence portion
uaguggggauuuuuuguuaug

SEQ ID NO: 6352 - RNA, 21 nt, Artificial Sequence
  LDLR targeting guide sequence portion
uaguuguauuucugaaauagg

SEQ ID NO: 6353 - RNA, 21 nt, Artificial Sequence
  LDLR targeting guide sequence portion
uauaaaacaaagcucuggcag

SEQ ID NO: 6354 - RNA, 21 nt, Artificial Sequence
  LDLR targeting guide sequence portion
uauacagugguuuaaaaagug

SEQ ID NO: 6355 - RNA, 21 nt, Artificial Sequence
  LDLR targeting guide sequence portion
uauagaagguuuuuguagccu

SEQ ID NO: 6356 - RNA, 21 nt, Artificial Sequence
  LDLR targeting guide sequence portion
uauauaaaacaaagcucuggc

SEQ ID NO: 6357 - RNA, 21 nt, Artificial Sequence
  LDLR targeting guide sequence portion
uauauauuuauucaucuggga

SEQ ID NO: 6358 - RNA, 21 nt, Artificial Sequence
  LDLR targeting guide sequence portion
uauauuuauucaucugggagg

SEQ ID NO: 6359 - RNA, 21 nt, Artificial Sequence
  LDLR targeting guide sequence portion
uauccuucacgaggaaaggaa

SEQ ID NO: 6360 - RNA, 21 nt, Artificial Sequence
  LDLR targeting guide sequence portion
uaucgagaacugccauugucg

SEQ ID NO: 6361 - RNA, 21 nt, Artificial Sequence
  LDLR targeting guide sequence portion
uaugaguggcuucugggagau

SEQ ID NO: 6362 - RNA, 21 nt, Artificial Sequence
  LDLR targeting guide sequence portion
uaugauuaugccacugcuuuc

SEQ ID NO: 6363 - RNA, 21 nt, Artificial Sequence
  LDLR targeting guide sequence portion
uaugcaaaugccuccaagcca

SEQ ID NO: 6364 - RNA, 21 nt, Artificial Sequence
  LDLR targeting guide sequence portion
uaugcaagccuugcuagacag

SEQ ID NO: 6365 - RNA, 21 nt, Artificial Sequence
  LDLR targeting guide sequence portion
uaugccacugcuuuccagccu

SEQ ID NO: 6366 - RNA, 21 nt, Artificial Sequence
  LDLR targeting guide sequence portion
uauguaugaguggcuucuggg

SEQ ID NO: 6367 - RNA, 21 nt, Artificial Sequence
  LDLR targeting guide sequence portion
uauguccgcccaccuagugcu

SEQ ID NO: 6368 - RNA, 21 nt, Artificial Sequence
  LDLR targeting guide sequence portion
uauguguuuaaaacaugcacg

SEQ ID NO: 6369 - RNA, 21 nt, Artificial Sequence
  LDLR targeting guide sequence portion
uauuaagggugaccagugacu

SEQ ID NO: 6370 - RNA, 21 nt, Artificial Sequence
  LDLR targeting guide sequence portion
uauuaagugccugagacaccc

SEQ ID NO: 6371 - RNA, 21 nt, Artificial Sequence
  LDLR targeting guide sequence portion
uauuauuuugcacuguuuucu

SEQ ID NO: 6372 - RNA, 21 nt, Artificial Sequence
  LDLR targeting guide sequence portion
uauucaaagacagagaagacc

SEQ ID NO: 6373 - RNA, 21 nt, Artificial Sequence
  LDLR targeting guide sequence portion
uauucacgaucacggcuuuga

SEQ ID NO: 6374 - RNA, 21 nt, Artificial Sequence
  LDLR targeting guide sequence portion
uauucaucugggaggcagaac

SEQ ID NO: 6375 - RNA, 21 nt, Artificial Sequence
  LDLR targeting guide sequence portion
uauucucggggcccuguguag

SEQ ID NO: 6376 - RNA, 21 nt, Artificial Sequence
  LDLR targeting guide sequence portion
uauugccucugaaaugccucu

SEQ ID NO: 6377 - RNA, 21 nt, Artificial Sequence
  LDLR targeting guide sequence portion
uauuuauuaagugccugagac

SEQ ID NO: 6378 - RNA, 21 nt, Artificial Sequence
  LDLR targeting guide sequence portion
uauuuauucaucugggaggca

SEQ ID NO: 6379 - RNA, 21 nt, Artificial Sequence
  LDLR targeting guide sequence portion
uauuuauuuuugcaaacccug

SEQ ID NO: 6380 - RNA, 21 nt, Artificial Sequence
  LDLR targeting guide sequence portion
uauuucugaaauagggucuuc

SEQ ID NO: 6381 - RNA, 21 nt, Artificial Sequence
  LDLR targeting guide sequence portion
uauuugcacgaacuggacugu

SEQ ID NO: 6382 - RNA, 21 nt, Artificial Sequence
  LDLR targeting guide sequence portion
uauuuguucagugacuauucu

SEQ ID NO: 6383 - RNA, 21 nt, Artificial Sequence
  LDLR targeting guide sequence portion
uauuuugcacuguuuucuguc

SEQ ID NO: 6384 - RNA, 21 nt, Artificial Sequence
  LDLR targeting guide sequence portion
uauuuuugcaaacccugguug

SEQ ID NO: 6385 - RNA, 21 nt, Artificial Sequence
  LDLR targeting guide sequence portion
ucaaaacuuccuggagagaaa

SEQ ID NO: 6386 - RNA, 21 nt, Artificial Sequence
  LDLR targeting guide sequence portion
ucaaacauggaagaugaaagg

SEQ ID NO: 6387 - RNA, 21 nt, Artificial Sequence
  LDLR targeting guide sequence portion
ucaaacgauccagacuggagg

SEQ ID NO: 6388 - RNA, 21 nt, Artificial Sequence
  LDLR targeting guide sequence portion
ucaaagacagagaagaccaaa

SEQ ID NO: 6389 - RNA, 21 nt, Artificial Sequence
  LDLR targeting guide sequence portion
ucaaagccgugaucgugaaua

SEQ ID NO: 6390 - RNA, 21 nt, Artificial Sequence
  LDLR targeting guide sequence portion
ucaaaugccugagcucaaacc

SEQ ID NO: 6391 - RNA, 21 nt, Artificial Sequence
  LDLR targeting guide sequence portion
ucaacacacaacagcagaugg

SEQ ID NO: 6392 - RNA, 21 nt, Artificial Sequence
  LDLR targeting guide sequence portion
ucaaccugccccucucugucc

SEQ ID NO: 6393 - RNA, 21 nt, Artificial Sequence
  LDLR targeting guide sequence portion
ucaacgacaagauuggggaag

SEQ ID NO: 6394 - RNA, 21 nt, Artificial Sequence
  LDLR targeting guide sequence portion
ucaacguguuuaccucuucua

SEQ ID NO: 6395 - RNA, 21 nt, Artificial Sequence
  LDLR targeting guide sequence portion
ucaagugauccagcucagccu

SEQ ID NO: 6396 - RNA, 21 nt, Artificial Sequence
  LDLR targeting guide sequence portion
ucaaugaaugccggggacaga

SEQ ID NO: 6397 - RNA, 21 nt, Artificial Sequence
  LDLR targeting guide sequence portion
ucacaagggauuggcaauugu

SEQ ID NO: 6398 - RNA, 21 nt, Artificial Sequence
  LDLR targeting guide sequence portion
ucacaggcacgugccaccgua

SEQ ID NO: 6399 - RNA, 21 nt, Artificial Sequence
  LDLR targeting guide sequence portion
ucacaguaagacauucaggcu

SEQ ID NO: 6400 - RNA, 21 nt, Artificial Sequence
  LDLR targeting guide sequence portion
ucaccaaaugaugccacuucc

SEQ ID NO: 6401 - RNA, 21 nt, Artificial Sequence
  LDLR targeting guide sequence portion
ucacccccgaaucaugaccca

SEQ ID NO: 6402 - RNA, 21 nt, Artificial Sequence
  LDLR targeting guide sequence portion
ucacccuuaauauuuauuaag

SEQ ID NO: 6403 - RNA, 21 nt, Artificial Sequence
  LDLR targeting guide sequence portion
ucaccgugcauguuuuaaaca

SEQ ID NO: 6404 - RNA, 21 nt, Artificial Sequence
  LDLR targeting guide sequence portion
ucacgacagccucaaaugccu

SEQ ID NO: 6405 - RNA, 21 nt, Artificial Sequence
  LDLR targeting guide sequence portion
ucacgaggaaaggaagaaacc

SEQ ID NO: 6406 - RNA, 21 nt, Artificial Sequence
  LDLR targeting guide sequence portion
ucacgaucacggcuuugaagu

SEQ ID NO: 6407 - RNA, 21 nt, Artificial Sequence
  LDLR targeting guide sequence portion
ucacgccacgucauccuccag

SEQ ID NO: 6408 - RNA, 21 nt, Artificial Sequence
  LDLR targeting guide sequence portion
ucacgcgggagucugacggag

SEQ ID NO: 6409 - RNA, 21 nt, Artificial Sequence
  LDLR targeting guide sequence portion
ucacggccaagguaaccgggu

SEQ ID NO: 6410 - RNA, 21 nt, Artificial Sequence
  LDLR targeting guide sequence portion
ucacggcuuugaagucccggu

SEQ ID NO: 6411 - RNA, 21 nt, Artificial Sequence
  LDLR targeting guide sequence portion
ucacgguggagagaaacucaa

SEQ ID NO: 6412 - RNA, 21 nt, Artificial Sequence
  LDLR targeting guide sequence portion
ucacugaacaaauacagcaac

SEQ ID NO: 6413 - RNA, 21 nt, Artificial Sequence
  LDLR targeting guide sequence portion
ucacugucucuccggacauca

SEQ ID NO: 6414 - RNA, 21 nt, Artificial Sequence
  LDLR targeting guide sequence portion
ucacuuccccaaucuugucgu

SEQ ID NO: 6415 - RNA, 21 nt, Artificial Sequence
  LDLR targeting guide sequence portion
ucacuuuuuaaaccacuguau

SEQ ID NO: 6416 - RNA, 21 nt, Artificial Sequence
  LDLR targeting guide sequence portion
ucagacucccgcgugaagaug

SEQ ID NO: 6417 - RNA, 21 nt, Artificial Sequence
  LDLR targeting guide sequence portion
ucagaggcaauaacccccuac

SEQ ID NO: 6418 - RNA, 21 nt, Artificial Sequence
  LDLR targeting guide sequence portion
ucagaguuguacacuguguac

SEQ ID NO: 6419 - RNA, 21 nt, Artificial Sequence
  LDLR targeting guide sequence portion
ucagcagcccauggccucugg

SEQ ID NO: 6420 - RNA, 21 nt, Artificial Sequence
  LDLR targeting guide sequence portion
ucagccagaucauuuccgacg

SEQ ID NO: 6421 - RNA, 21 nt, Artificial Sequence
  LDLR targeting guide sequence portion
ucagccucgccaugccuggcc

SEQ ID NO: 6422 - RNA, 21 nt, Artificial Sequence
  LDLR targeting guide sequence portion
ucagcuggguacgguggcacg

SEQ ID NO: 6423 - RNA, 21 nt, Artificial Sequence
  LDLR targeting guide sequence portion
ucaggaaggguucugggcagg

SEQ ID NO: 6424 - RNA, 21 nt, Artificial Sequence
  LDLR targeting guide sequence portion
ucaggacaccagccuggugcc

SEQ ID NO: 6425 - RNA, 21 nt, Artificial Sequence
  LDLR targeting guide sequence portion
ucaggagucaacguguuuacc

SEQ ID NO: 6426 - RNA, 21 nt, Artificial Sequence
  LDLR targeting guide sequence portion
ucaggaguuggagaccaggcc

SEQ ID NO: 6427 - RNA, 21 nt, Artificial Sequence
  LDLR targeting guide sequence portion
ucaggcacuuaauaaauauua

SEQ ID NO: 6428 - RNA, 21 nt, Artificial Sequence
  LDLR targeting guide sequence portion
ucaggcauuugaggcugucgu

SEQ ID NO: 6429 - RNA, 21 nt, Artificial Sequence
  LDLR targeting guide sequence portion
ucaggcccagagaagcaagug

SEQ ID NO: 6430 - RNA, 21 nt, Artificial Sequence
  LDLR targeting guide sequence portion
ucaggccuggucuccaacucc

SEQ ID NO: 6431 - RNA, 21 nt, Artificial Sequence
  LDLR targeting guide sequence portion
ucaggcuacaaaaaccuucua

SEQ ID NO: 6432 - RNA, 21 nt, Artificial Sequence
  LDLR targeting guide sequence portion
ucaggcucugccucugggaag

SEQ ID NO: 6433 - RNA, 21 nt, Artificial Sequence
  LDLR targeting guide sequence portion
ucagguucuuucugaaaucgc

SEQ ID NO: 6434 - RNA, 21 nt, Artificial Sequence
  LDLR targeting guide sequence portion
ucagucuggaggaugacgugg

SEQ ID NO: 6435 - RNA, 21 nt, Artificial Sequence
  LDLR targeting guide sequence portion
ucagugacuauucucggggcc

SEQ ID NO: 6436 - RNA, 21 nt, Artificial Sequence
  LDLR targeting guide sequence portion
ucagugcaacaguaacacggc

SEQ ID NO: 6437 - RNA, 21 nt, Artificial Sequence
  LDLR targeting guide sequence portion
ucaguucagaguuguacacug

SEQ ID NO: 6438 - RNA, 21 nt, Artificial Sequence
  LDLR targeting guide sequence portion
ucauacauacaacggggacau

SEQ ID NO: 6439 - RNA, 21 nt, Artificial Sequence
  LDLR targeting guide sequence portion
ucauagcucacgacagccuca

SEQ ID NO: 6440 - RNA, 21 nt, Artificial Sequence
  LDLR targeting guide sequence portion
ucauccaccaaucucuaagcc

SEQ ID NO: 6441 - RNA, 21 nt, Artificial Sequence
  LDLR targeting guide sequence portion
ucauccuccagacugaccauc

SEQ ID NO: 6442 - RNA, 21 nt, Artificial Sequence
  LDLR targeting guide sequence portion
ucauccugguccccccgggcc

SEQ ID NO: 6443 - RNA, 21 nt, Artificial Sequence
  LDLR targeting guide sequence portion
ucaucugggaggcagaacagg

SEQ ID NO: 6444 - RNA, 21 nt, Artificial Sequence
  LDLR targeting guide sequence portion
ucaucuuccauguuugaggau

SEQ ID NO: 6445 - RNA, 21 nt, Artificial Sequence
  LDLR targeting guide sequence portion
ucaugacccacccagugucuu

SEQ ID NO: 6446 - RNA, 21 nt, Artificial Sequence
  LDLR targeting guide sequence portion
ucaugauucgggggugacagg

SEQ ID NO: 6447 - RNA, 21 nt, Artificial Sequence
  LDLR targeting guide sequence portion
ucauggcgucggaaaugaucu

SEQ ID NO: 6448 - RNA, 21 nt, Artificial Sequence
  LDLR targeting guide sequence portion
ucauucaccaaaugaugccac

SEQ ID NO: 6449 - RNA, 21 nt, Artificial Sequence
  LDLR targeting guide sequence portion
ucauucucccaaaaagcguug

SEQ ID NO: 6450 - RNA, 21 nt, Artificial Sequence
  LDLR targeting guide sequence portion
ucauugacacgggcuuucccu

SEQ ID NO: 6451 - RNA, 21 nt, Artificial Sequence
  LDLR targeting guide sequence portion
ucauuuccgacgccaugaauc

SEQ ID NO: 6452 - RNA, 21 nt, Artificial Sequence
  LDLR targeting guide sequence portion
ucauuuggugaaugaguuugg

SEQ ID NO: 6453 - RNA, 21 nt, Artificial Sequence
  LDLR targeting guide sequence portion
ucauuuuuuaagagauggggu

SEQ ID NO: 6454 - RNA, 21 nt, Artificial Sequence
  LDLR targeting guide sequence portion
uccaacuccugaacucaagug

SEQ ID NO: 6455 - RNA, 21 nt, Artificial Sequence
  LDLR targeting guide sequence portion
uccaagccauucacuucccca

SEQ ID NO: 6456 - RNA, 21 nt, Artificial Sequence
  LDLR targeting guide sequence portion
uccaccaaucucuaagccaaa

SEQ ID NO: 6457 - RNA, 21 nt, Artificial Sequence
  LDLR targeting guide sequence portion
uccaccgugacacaauccuca

SEQ ID NO: 6458 - RNA, 21 nt, Artificial Sequence
  LDLR targeting guide sequence portion
uccacuucuaugcaaaugccu

SEQ ID NO: 6459 - RNA, 21 nt, Artificial Sequence
  LDLR targeting guide sequence portion
uccaggaaguuuugaguuucu

SEQ ID NO: 6460 - RNA, 21 nt, Artificial Sequence
  LDLR targeting guide sequence portion
uccaggcagauguucacgcca

SEQ ID NO: 6461 - RNA, 21 nt, Artificial Sequence
  LDLR targeting guide sequence portion
uccagucuggaucguuugacg

SEQ ID NO: 6462 - RNA, 21 nt, Artificial Sequence
  LDLR targeting guide sequence portion
uccaguucgugcaaauaaucu

SEQ ID NO: 6463 - RNA, 21 nt, Artificial Sequence
  LDLR targeting guide sequence portion
uccauguuugaggauuguguc

SEQ ID NO: 6464 - RNA, 21 nt, Artificial Sequence
  LDLR targeting guide sequence portion
uccauucccguggucuccuug

SEQ ID NO: 6465 - RNA, 21 nt, Artificial Sequence
  LDLR targeting guide sequence portion
uccauuucucuccaggaaguu

SEQ ID NO: 6466 - RNA, 21 nt, Artificial Sequence
  LDLR targeting guide sequence portion
ucccaaaaagcguugcacaca

SEQ ID NO: 6467 - RNA, 21 nt, Artificial Sequence
  LDLR targeting guide sequence portion
ucccaacacacacgacagaaa

SEQ ID NO: 6468 - RNA, 21 nt, Artificial Sequence
  LDLR targeting guide sequence portion
ucccaacccaagccauugcau

SEQ ID NO: 6469 - RNA, 21 nt, Artificial Sequence
  LDLR targeting guide sequence portion
ucccaccucagccucgccaug

SEQ ID NO: 6470 - RNA, 21 nt, Artificial Sequence
  LDLR targeting guide sequence portion
ucccagaagccacucauacau

SEQ ID NO: 6471 - RNA, 21 nt, Artificial Sequence
  LDLR targeting guide sequence portion
ucccagaggcagagccugagu

SEQ ID NO: 6472 - RNA, 21 nt, Artificial Sequence
  LDLR targeting guide sequence portion
ucccaggccagggaaagcccg

SEQ ID NO: 6473 - RNA, 21 nt, Artificial Sequence
  LDLR targeting guide sequence portion
ucccaucccaacacacacgac

SEQ ID NO: 6474 - RNA, 21 nt, Artificial Sequence
  LDLR targeting guide sequence portion
ucccaucucuacaaaaaccaa

SEQ ID NO: 6475 - RNA, 21 nt, Artificial Sequence
  LDLR targeting guide sequence portion
uccccaaucuugucguugaug

SEQ ID NO: 6476 - RNA, 21 nt, Artificial Sequence
  LDLR targeting guide sequence portion
uccccacuaucuguacaggga

SEQ ID NO: 6477 - RNA, 21 nt, Artificial Sequence
  LDLR targeting guide sequence portion
uccccagggacaaaacacugu

SEQ ID NO: 6478 - RNA, 21 nt, Artificial Sequence
  LDLR targeting guide sequence portion
uccccggcauucauugacacg

SEQ ID NO: 6479 - RNA, 21 nt, Artificial Sequence
  LDLR targeting guide sequence portion
uccccguuguauguaugagug

SEQ ID NO: 6480 - RNA, 21 nt, Artificial Sequence
  LDLR targeting guide sequence portion
uccccuccccuuucaucuucc

SEQ ID NO: 6481 - RNA, 21 nt, Artificial Sequence
  LDLR targeting guide sequence portion
uccccuuucaucuuccauguu

SEQ ID NO: 6482 - RNA, 21 nt, Artificial Sequence
  LDLR targeting guide sequence portion
ucccgaccccuacccacuucc

SEQ ID NO: 6483 - RNA, 21 nt, Artificial Sequence
  LDLR targeting guide sequence portion
ucccgcgugaagaugucacaa

SEQ ID NO: 6484 - RNA, 21 nt, Artificial Sequence
  LDLR targeting guide sequence portion
ucccggucaaccugccccucu

SEQ ID NO: 6485 - RNA, 21 nt, Artificial Sequence
  LDLR targeting guide sequence portion
ucccgucaaacgauccagacu

SEQ ID NO: 6486 - RNA, 21 nt, Artificial Sequence
  LDLR targeting guide sequence portion
ucccgucccugcccagaaccc

SEQ ID NO: 6487 - RNA, 21 nt, Artificial Sequence
  LDLR targeting guide sequence portion
ucccguggucuccuugcacuu

SEQ ID NO: 6488 - RNA, 21 nt, Artificial Sequence
  LDLR targeting guide sequence portion
ucccguuggugccaucugcug

SEQ ID NO: 6489 - RNA, 21 nt, Artificial Sequence
  LDLR targeting guide sequence portion
ucccugcccagaacccuuccu

SEQ ID NO: 6490 - RNA, 21 nt, Artificial Sequence
  LDLR targeting guide sequence portion
ucccuggccugggaucccauc

SEQ ID NO: 6491 - RNA, 21 nt, Artificial Sequence
  LDLR targeting guide sequence portion
ucccuggggacaauugccaau

SEQ ID NO: 6492 - RNA, 21 nt, Artificial Sequence
  LDLR targeting guide sequence portion
ucccuguacagauagugggga

SEQ ID NO: 6493 - RNA, 21 nt, Artificial Sequence
  LDLR targeting guide sequence portion
ucccuugugacaucuucacgc

SEQ ID NO: 6494 - RNA, 21 nt, Artificial Sequence
  LDLR targeting guide sequence portion
ucccuuuccuggcuuaaggaa

SEQ ID NO: 6495 - RNA, 21 nt, Artificial Sequence
  LDLR targeting guide sequence portion
uccgaaaccagaaaggcuuau

SEQ ID NO: 6496 - RNA, 21 nt, Artificial Sequence
  LDLR targeting guide sequence portion
uccgaagccuguucugccucc

SEQ ID NO: 6497 - RNA, 21 nt, Artificial Sequence
  LDLR targeting guide sequence portion
uccgacgccaugaaucccuuu

SEQ ID NO: 6498 - RNA, 21 nt, Artificial Sequence
  LDLR targeting guide sequence portion
uccgcccaccuagugcuucca

SEQ ID NO: 6499 - RNA, 21 nt, Artificial Sequence
  LDLR targeting guide sequence portion
uccggacaucagugcaacagu

SEQ ID NO: 6500 - RNA, 21 nt, Artificial Sequence
  LDLR targeting guide sequence portion
uccggagagacagugacagcc

SEQ ID NO: 6501 - RNA, 21 nt, Artificial Sequence
  LDLR targeting guide sequence portion
uccgucagacucccgcgugaa

SEQ ID NO: 6502 - RNA, 21 nt, Artificial Sequence
  LDLR targeting guide sequence portion
uccgugguggcaccgagacca

SEQ ID NO: 6503 - RNA, 21 nt, Artificial Sequence
  LDLR targeting guide sequence portion
uccucaaacauggaagaugaa

SEQ ID NO: 6504 - RNA, 21 nt, Artificial Sequence
  LDLR targeting guide sequence portion
uccucacggccaagguaaccg

SEQ ID NO: 6505 - RNA, 21 nt, Artificial Sequence
  LDLR targeting guide sequence portion
uccuccagucuggaucguuug

SEQ ID NO: 6506 - RNA, 21 nt, Artificial Sequence
  LDLR targeting guide sequence portion
uccucccaccucagccucgcc

SEQ ID NO: 6507 - RNA, 21 nt, Artificial Sequence
  LDLR targeting guide sequence portion
uccucccgaccccuacccacu

SEQ ID NO: 6508 - RNA, 21 nt, Artificial Sequence
  LDLR targeting guide sequence portion
uccucgugaaggauaagagaa

SEQ ID NO: 6509 - RNA, 21 nt, Artificial Sequence
  LDLR targeting guide sequence portion
uccugaacucaagugauccag

SEQ ID NO: 6510 - RNA, 21 nt, Artificial Sequence
  LDLR targeting guide sequence portion
uccugacagccacaccugggu

SEQ ID NO: 6511 - RNA, 21 nt, Artificial Sequence
  LDLR targeting guide sequence portion
uccugagaccucgccggccuu

SEQ ID NO: 6512 - RNA, 21 nt, Artificial Sequence
  LDLR targeting guide sequence portion
uccugaguuuagggguuuggc

SEQ ID NO: 6513 - RNA, 21 nt, Artificial Sequence
  LDLR targeting guide sequence portion
uccuggagagaaauggaggug

SEQ ID NO: 6514 - RNA, 21 nt, Artificial Sequence
  LDLR targeting guide sequence portion
uccuggcuuaaggaagguaca

SEQ ID NO: 6515 - RNA, 21 nt, Artificial Sequence
  LDLR targeting guide sequence portion
uccugguccccccgggccugu

SEQ ID NO: 6516 - RNA, 21 nt, Artificial Sequence
  LDLR targeting guide sequence portion
uccuuaagccaggaaagggau

SEQ ID NO: 6517 - RNA, 21 nt, Artificial Sequence
  LDLR targeting guide sequence portion
uccuucacgaggaaaggaaga

SEQ ID NO: 6518 - RNA, 21 nt, Artificial Sequence
  LDLR targeting guide sequence portion
uccuugcacuuucucaguuca

SEQ ID NO: 6519 - RNA, 21 nt, Artificial Sequence
  LDLR targeting guide sequence portion
uccuuuccucgugaaggauaa

SEQ ID NO: 6520 - RNA, 21 nt, Artificial Sequence
  LDLR targeting guide sequence portion
ucgaaagacacuggguggguc

SEQ ID NO: 6521 - RNA, 21 nt, Artificial Sequence
  LDLR targeting guide sequence portion
ucgagaacugccauugucguc

SEQ ID NO: 6522 - RNA, 21 nt, Artificial Sequence
  LDLR targeting guide sequence portion
ucgagguggguuuguaccuuc

SEQ ID NO: 6523 - RNA, 21 nt, Artificial Sequence
  LDLR targeting guide sequence portion
ucgauauucacgaucacggcu

SEQ ID NO: 6524 - RNA, 21 nt, Artificial Sequence
  LDLR targeting guide sequence portion
ucgaucauggcucacugcaac

SEQ ID NO: 6525 - RNA, 21 nt, Artificial Sequence
  LDLR targeting guide sequence portion
ucgccaugccuggccagaggc

SEQ ID NO: 6526 - RNA, 21 nt, Artificial Sequence
  LDLR targeting guide sequence portion
ucgccggccuuguuuuauuca

SEQ ID NO: 6527 - RNA, 21 nt, Artificial Sequence
  LDLR targeting guide sequence portion
ucgccguguuacuguugcacu

SEQ ID NO: 6528 - RNA, 21 nt, Artificial Sequence
  LDLR targeting guide sequence portion
ucgcuuuguugcucaggccug

SEQ ID NO: 6529 - RNA, 21 nt, Artificial Sequence
  LDLR targeting guide sequence portion
ucggaaaugaucuggcugaau

SEQ ID NO: 6530 - RNA, 21 nt, Artificial Sequence
  LDLR targeting guide sequence portion
ucggacagugcccaugcaaug

SEQ ID NO: 6531 - RNA, 21 nt, Artificial Sequence
  LDLR targeting guide sequence portion
ucggagcacguaaaugcgucc

SEQ ID NO: 6532 - RNA, 21 nt, Artificial Sequence
  LDLR targeting guide sequence portion
ucgggaggaugggcaccaggc

SEQ ID NO: 6533 - RNA, 21 nt, Artificial Sequence
  LDLR targeting guide sequence portion
ucggggcccuguguagggggu

SEQ ID NO: 6534 - RNA, 21 nt, Artificial Sequence
  LDLR targeting guide sequence portion
ucgggggugacagggcaaagg

SEQ ID NO: 6535 - RNA, 21 nt, Artificial Sequence
  LDLR targeting guide sequence portion
ucggugccaccacggauucag

SEQ ID NO: 6536 - RNA, 21 nt, Artificial Sequence
  LDLR targeting guide sequence portion
ucgucuuuauguccgcccacc

SEQ ID NO: 6537 - RNA, 21 nt, Artificial Sequence
  LDLR targeting guide sequence portion
ucgugaaggauaagagaaaca

SEQ ID NO: 6538 - RNA, 21 nt, Artificial Sequence
  LDLR targeting guide sequence portion
ucgugaauaucgagaacugcc

SEQ ID NO: 6539 - RNA, 21 nt, Artificial Sequence
  LDLR targeting guide sequence portion
ucgugagcuaugauuaugcca

SEQ ID NO: 6540 - RNA, 21 nt, Artificial Sequence
  LDLR targeting guide sequence portion
ucguguguguugggaugggau

SEQ ID NO: 6541 - RNA, 21 nt, Artificial Sequence
  LDLR targeting guide sequence portion
ucguugauggguauguguuua

SEQ ID NO: 6542 - RNA, 21 nt, Artificial Sequence
  LDLR targeting guide sequence portion
ucguuugacgggacuucaggu

SEQ ID NO: 6543 - RNA, 21 nt, Artificial Sequence
  LDLR targeting guide sequence portion
ucuaagccaaaccccuaaacu

SEQ ID NO: 6544 - RNA, 21 nt, Artificial Sequence
  LDLR targeting guide sequence portion
ucuagcaaggcuugcauagaa

SEQ ID NO: 6545 - RNA, 21 nt, Artificial Sequence
  LDLR targeting guide sequence portion
ucuauacagugguuuaaaaag

SEQ ID NO: 6546 - RNA, 21 nt, Artificial Sequence
  LDLR targeting guide sequence portion
ucuaugcaaaugccuccaagc

SEQ ID NO: 6547 - RNA, 21 nt, Artificial Sequence
  LDLR targeting guide sequence portion
ucuaugcaagccuugcuagac

SEQ ID NO: 6548 - RNA, 21 nt, Artificial Sequence
  LDLR targeting guide sequence portion
ucuauuuauuuuugcaaaccc

SEQ ID NO: 6549 - RNA, 21 nt, Artificial Sequence
  LDLR targeting guide sequence portion
ucucaggaaggguucugggca

SEQ ID NO: 6550 - RNA, 21 nt, Artificial Sequence
  LDLR targeting guide sequence portion
ucucaggcacuuaauaaauau

SEQ ID NO: 6551 - RNA, 21 nt, Artificial Sequence
  LDLR targeting guide sequence portion
ucucaguucagaguuguacac

SEQ ID NO: 6552 - RNA, 21 nt, Artificial Sequence
  LDLR targeting guide sequence portion
ucuccaccgugacacaauccu

SEQ ID NO: 6553 - RNA, 21 nt, Artificial Sequence
  LDLR targeting guide sequence portion
ucuccaggaaguuuugaguuu

SEQ ID NO: 6554 - RNA, 21 nt, Artificial Sequence
  LDLR targeting guide sequence portion
ucucccaaaaagcguugcaca

SEQ ID NO: 6555 - RNA, 21 nt, Artificial Sequence
  LDLR targeting guide sequence portion
ucucccagaagccacucauac

SEQ ID NO: 6556 - RNA, 21 nt, Artificial Sequence
  LDLR targeting guide sequence portion
ucuccggacaucagugcaaca

SEQ ID NO: 6557 - RNA, 21 nt, Artificial Sequence
  LDLR targeting guide sequence portion
ucuccuugcacuuucucaguu

SEQ ID NO: 6558 - RNA, 21 nt, Artificial Sequence
  LDLR targeting guide sequence portion
ucucgauauucacgaucacgg

SEQ ID NO: 6559 - RNA, 21 nt, Artificial Sequence
  LDLR targeting guide sequence portion
ucucgcuuuguugcucaggcc

SEQ ID NO: 6560 - RNA, 21 nt, Artificial Sequence
  LDLR targeting guide sequence portion
ucucggggcccuguguagggg

SEQ ID NO: 6561 - RNA, 21 nt, Artificial Sequence
  LDLR targeting guide sequence portion
ucucggugccaccacggauuc

SEQ ID NO: 6562 - RNA, 21 nt, Artificial Sequence
  LDLR targeting guide sequence portion
ucucuaagccaaaccccuaaa

SEQ ID NO: 6563 - RNA, 21 nt, Artificial Sequence
  LDLR targeting guide sequence portion
ucucuccaccgugacacaauc

SEQ ID NO: 6564 - RNA, 21 nt, Artificial Sequence
  LDLR targeting guide sequence portion
ucucuccaggaaguuuugagu

SEQ ID NO: 6565 - RNA, 21 nt, Artificial Sequence
  LDLR targeting guide sequence portion
ucucuccggacaucagugcaa

SEQ ID NO: 6566 - RNA, 21 nt, Artificial Sequence
  LDLR targeting guide sequence portion
ucucugggccugacauccccu

SEQ ID NO: 6567 - RNA, 21 nt, Artificial Sequence
  LDLR targeting guide sequence portion
ucucuguccccggcauucauu

SEQ ID NO: 6568 - RNA, 21 nt, Artificial Sequence
  LDLR targeting guide sequence portion
ucucugucuuugaauaaaaca

SEQ ID NO: 6569 - RNA, 21 nt, Artificial Sequence
  LDLR targeting guide sequence portion
ucucuuaaaaaaugaauuugg

SEQ ID NO: 6570 - RNA, 21 nt, Artificial Sequence
  LDLR targeting guide sequence portion
ucucuuauccuucacgaggaa

SEQ ID NO: 6571 - RNA, 21 nt, Artificial Sequence
  LDLR targeting guide sequence portion
ucugaaauagggucuucaucu

SEQ ID NO: 6572 - RNA, 21 nt, Artificial Sequence
  LDLR targeting guide sequence portion
ucugaaaucgccguguuacug

SEQ ID NO: 6573 - RNA, 21 nt, Artificial Sequence
  LDLR targeting guide sequence portion
ucugaaaugccucuucuuuau

SEQ ID NO: 6574 - RNA, 21 nt, Artificial Sequence
  LDLR targeting guide sequence portion
ucugaacugagaaagugcaag

SEQ ID NO: 6575 - RNA, 21 nt, Artificial Sequence
  LDLR targeting guide sequence portion
ucugacggaggcugucacugu

SEQ ID NO: 6576 - RNA, 21 nt, Artificial Sequence
  LDLR targeting guide sequence portion
ucugccucugggaaguggcau

SEQ ID NO: 6577 - RNA, 21 nt, Artificial Sequence
  LDLR targeting guide sequence portion
ucugccuggagucccgucccu

SEQ ID NO: 6578 - RNA, 21 nt, Artificial Sequence
  LDLR targeting guide sequence portion
ucugcuguuguguguugaaag

SEQ ID NO: 6579 - RNA, 21 nt, Artificial Sequence
  LDLR targeting guide sequence portion
ucuggaggaugacguggcgug

SEQ ID NO: 6580 - RNA, 21 nt, Artificial Sequence
  LDLR targeting guide sequence portion
ucuggaucguuugacgggacu

SEQ ID NO: 6581 - RNA, 21 nt, Artificial Sequence
  LDLR targeting guide sequence portion
ucuggcaggcaaugcuuuggu

SEQ ID NO: 6582 - RNA, 21 nt, Artificial Sequence
  LDLR targeting guide sequence portion
ucuggccaggcauggcgaggc

SEQ ID NO: 6583 - RNA, 21 nt, Artificial Sequence
  LDLR targeting guide sequence portion
ucuggcugaauccgugguggc

SEQ ID NO: 6584 - RNA, 21 nt, Artificial Sequence
  LDLR targeting guide sequence portion
ucugggaaguggcaucauuug

SEQ ID NO: 6585 - RNA, 21 nt, Artificial Sequence
  LDLR targeting guide sequence portion
ucugggagaugggugucacuu

SEQ ID NO: 6586 - RNA, 21 nt, Artificial Sequence
  LDLR targeting guide sequence portion
ucugggaggcagaacaggcuu

SEQ ID NO: 6587 - RNA, 21 nt, Artificial Sequence
  LDLR targeting guide sequence portion
ucugggcagggacgggacucc

SEQ ID NO: 6588 - RNA, 21 nt, Artificial Sequence
  LDLR targeting guide sequence portion
ucugggccugacauccccucc

SEQ ID NO: 6589 - RNA, 21 nt, Artificial Sequence
  LDLR targeting guide sequence portion
ucugguuucggagcacguaaa

SEQ ID NO: 6590 - RNA, 21 nt, Artificial Sequence
  LDLR targeting guide sequence portion
ucuguacagggacgcauuuac

SEQ ID NO: 6591 - RNA, 21 nt, Artificial Sequence
  LDLR targeting guide sequence portion
ucuguccccggcauucauuga

SEQ ID NO: 6592 - RNA, 21 nt, Artificial Sequence
  LDLR targeting guide sequence portion
ucugucguguguguugggaug

SEQ ID NO: 6593 - RNA, 21 nt, Artificial Sequence
  LDLR targeting guide sequence portion
ucugucuuugaauaaaacaag

SEQ ID NO: 6594 - RNA, 21 nt, Artificial Sequence
  LDLR targeting guide sequence portion
ucuuaaaaaaugaauuuggcc

SEQ ID NO: 6595 - RNA, 21 nt, Artificial Sequence
  LDLR targeting guide sequence portion
ucuuauccuucacgaggaaag

SEQ ID NO: 6596 - RNA, 21 nt, Artificial Sequence
  LDLR targeting guide sequence portion
ucuucacgcgggagucugacg

SEQ ID NO: 6597 - RNA, 21 nt, Artificial Sequence
  LDLR targeting guide sequence portion
ucuuccauguuugaggauugu

SEQ ID NO: 6598 - RNA, 21 nt, Artificial Sequence
  LDLR targeting guide sequence portion
ucuuccuuuccucgugaagga

SEQ ID NO: 6599 - RNA, 21 nt, Artificial Sequence
  LDLR targeting guide sequence portion
ucuucuaugcaagccuugcua

SEQ ID NO: 6600 - RNA, 21 nt, Artificial Sequence
  LDLR targeting guide sequence portion
ucuucucugucuuugaauaaa

SEQ ID NO: 6601 - RNA, 21 nt, Artificial Sequence
  LDLR targeting guide sequence portion
ucuugucguugauggguaugu

SEQ ID NO: 6602 - RNA, 21 nt, Artificial Sequence
  LDLR targeting guide sequence portion
ucuuuauguccgcccaccuag

SEQ ID NO: 6603 - RNA, 21 nt, Artificial Sequence
  LDLR targeting guide sequence portion
ucuuucgagguggguuuguac

SEQ ID NO: 6604 - RNA, 21 nt, Artificial Sequence
  LDLR targeting guide sequence portion
ucuuucugaaaucgccguguu

SEQ ID NO: 6605 - RNA, 21 nt, Artificial Sequence
  LDLR targeting guide sequence portion
ucuuugaauaaaacaaggccg

SEQ ID NO: 6606 - RNA, 21 nt, Artificial Sequence
  LDLR targeting guide sequence portion
ucuuuguacauaaagaagagg

SEQ ID NO: 6607 - RNA, 21 nt, Artificial Sequence
  LDLR targeting guide sequence portion
ugaaagccacuugcuucucug

SEQ ID NO: 6608 - RNA, 21 nt, Artificial Sequence
  LDLR targeting guide sequence portion
ugaaaggggaggggaugucag

SEQ ID NO: 6609 - RNA, 21 nt, Artificial Sequence
  LDLR targeting guide sequence portion
ugaaaucgccguguuacuguu

SEQ ID NO: 6610 - RNA, 21 nt, Artificial Sequence
  LDLR targeting guide sequence portion
ugaaaugccucuucuuuaugu

SEQ ID NO: 6611 - RNA, 21 nt, Artificial Sequence
  LDLR targeting guide sequence portion
ugaacaaauacagcaaccagg

SEQ ID NO: 6612 - RNA, 21 nt, Artificial Sequence
  LDLR targeting guide sequence portion
ugaacaucugccuggaguccc

SEQ ID NO: 6613 - RNA, 21 nt, Artificial Sequence
  LDLR targeting guide sequence portion
ugaacugagaaagugcaagga

SEQ ID NO: 6614 - RNA, 21 nt, Artificial Sequence
  LDLR targeting guide sequence portion
ugaagacccuauuucagaaau

SEQ ID NO: 6615 - RNA, 21 nt, Artificial Sequence
  LDLR targeting guide sequence portion
ugaagaugucacaagggauug

SEQ ID NO: 6616 - RNA, 21 nt, Artificial Sequence
  LDLR targeting guide sequence portion
ugaaggauaagagaaacaggc

SEQ ID NO: 6617 - RNA, 21 nt, Artificial Sequence
  LDLR targeting guide sequence portion
ugaagucccggucaaccugcc

SEQ ID NO: 6618 - RNA, 21 nt, Artificial Sequence
  LDLR targeting guide sequence portion
ugaagucccgucaaacgaucc

SEQ ID NO: 6619 - RNA, 21 nt, Artificial Sequence
  LDLR targeting guide sequence portion
ugaauaaaacaaggccggcga

SEQ ID NO: 6620 - RNA, 21 nt, Artificial Sequence
  LDLR targeting guide sequence portion
ugaauaucgagaacugccauu

SEQ ID NO: 6621 - RNA, 21 nt, Artificial Sequence
  LDLR targeting guide sequence portion
ugaaucccuuuccuggcuuaa

SEQ ID NO: 6622 - RNA, 21 nt, Artificial Sequence
  LDLR targeting guide sequence portion
ugaauccgugguggcaccgag

SEQ ID NO: 6623 - RNA, 21 nt, Artificial Sequence
  LDLR targeting guide sequence portion
ugaaugaguuuggucucggug

SEQ ID NO: 6624 - RNA, 21 nt, Artificial Sequence
  LDLR targeting guide sequence portion
ugaaugccggggacagagagg

SEQ ID NO: 6625 - RNA, 21 nt, Artificial Sequence
  LDLR targeting guide sequence portion
ugaauggcuuggaggcauuug

SEQ ID NO: 6626 - RNA, 21 nt, Artificial Sequence
  LDLR targeting guide sequence portion
ugaauuuggccagacacaggu

SEQ ID NO: 6627 - RNA, 21 nt, Artificial Sequence
  LDLR targeting guide sequence portion
ugacacaauccucaaacaugg

SEQ ID NO: 6628 - RNA, 21 nt, Artificial Sequence
  LDLR targeting guide sequence portion
ugacacccaucucccagaagc

SEQ ID NO: 6629 - RNA, 21 nt, Artificial Sequence
  LDLR targeting guide sequence portion
ugacaccuccauuucucucca

SEQ ID NO: 6630 - RNA, 21 nt, Artificial Sequence
  LDLR targeting guide sequence portion
ugacacgggcuuucccuggcc

SEQ ID NO: 6631 - RNA, 21 nt, Artificial Sequence
  LDLR targeting guide sequence portion
ugacagccacaccugggugca

SEQ ID NO: 6632 - RNA, 21 nt, Artificial Sequence
  LDLR targeting guide sequence portion
ugacagccuccgucagacucc

SEQ ID NO: 6633 - RNA, 21 nt, Artificial Sequence
  LDLR targeting guide sequence portion
ugacagggcaaaggcuaaccu

SEQ ID NO: 6634 - RNA, 21 nt, Artificial Sequence
  LDLR targeting guide sequence portion
ugacauccccuccccuuucau

SEQ ID NO: 6635 - RNA, 21 nt, Artificial Sequence
  LDLR targeting guide sequence portion
ugacaucuucacgcgggaguc

SEQ ID NO: 6636 - RNA, 21 nt, Artificial Sequence
  LDLR targeting guide sequence portion
ugaccagugacucaggcucug

SEQ ID NO: 6637 - RNA, 21 nt, Artificial Sequence
  LDLR targeting guide sequence portion
ugacccacccagugucuuucg

SEQ ID NO: 6638 - RNA, 21 nt, Artificial Sequence
  LDLR targeting guide sequence portion
ugaccgggacuucaaagccgu

SEQ ID NO: 6639 - RNA, 21 nt, Artificial Sequence
  LDLR targeting guide sequence portion
ugacggaggcugucacugucu

SEQ ID NO: 6640 - RNA, 21 nt, Artificial Sequence
  LDLR targeting guide sequence portion
ugacgggacuucagguucuuu

SEQ ID NO: 6641 - RNA, 21 nt, Artificial Sequence
  LDLR targeting guide sequence portion
ugacguggcgugaacaucugc

SEQ ID NO: 6642 - RNA, 21 nt, Artificial Sequence
  LDLR targeting guide sequence portion
ugacuauucucggggcccugu

SEQ ID NO: 6643 - RNA, 21 nt, Artificial Sequence
  LDLR targeting guide sequence portion
ugacuccugaguuuagggguu

SEQ ID NO: 6644 - RNA, 21 nt, Artificial Sequence
  LDLR targeting guide sequence portion
ugagaaagugcaaggagacca

SEQ ID NO: 6645 - RNA, 21 nt, Artificial Sequence
  LDLR targeting guide sequence portion
ugagacacccgguuaccuugg

SEQ ID NO: 6646 - RNA, 21 nt, Artificial Sequence
  LDLR targeting guide sequence portion
ugagaccucgccggccuuguu

SEQ ID NO: 6647 - RNA, 21 nt, Artificial Sequence
  LDLR targeting guide sequence portion
ugagcaacaaagcgagauccc

SEQ ID NO: 6648 - RNA, 21 nt, Artificial Sequence
  LDLR targeting guide sequence portion
ugagcuaugauuaugccacug

SEQ ID NO: 6649 - RNA, 21 nt, Artificial Sequence
  LDLR targeting guide sequence portion
ugagcucaggcauuugaggcu

SEQ ID NO: 6650 - RNA, 21 nt, Artificial Sequence
  LDLR targeting guide sequence portion
ugagcuggaucacuugaguuc

SEQ ID NO: 6651 - RNA, 21 nt, Artificial Sequence
  LDLR targeting guide sequence portion
ugaggacacguggccugcacc

SEQ ID NO: 6652 - RNA, 21 nt, Artificial Sequence
  LDLR targeting guide sequence portion
ugaggauugugucacggugga

SEQ ID NO: 6653 - RNA, 21 nt, Artificial Sequence
  LDLR targeting guide sequence portion
ugaggcaccugugucuggcca

SEQ ID NO: 6654 - RNA, 21 nt, Artificial Sequence
  LDLR targeting guide sequence portion
ugaggcagggccagggggucc

SEQ ID NO: 6655 - RNA, 21 nt, Artificial Sequence
  LDLR targeting guide sequence portion
ugaggcugucgugagcuauga

SEQ ID NO: 6656 - RNA, 21 nt, Artificial Sequence
  LDLR targeting guide sequence portion
ugagucacuggucacccuuaa

SEQ ID NO: 6657 - RNA, 21 nt, Artificial Sequence
  LDLR targeting guide sequence portion
ugaguggcuucugggagaugg

SEQ ID NO: 6658 - RNA, 21 nt, Artificial Sequence
  LDLR targeting guide sequence portion
ugaguucaggaguuggagacc

SEQ ID NO: 6659 - RNA, 21 nt, Artificial Sequence
  LDLR targeting guide sequence portion
ugaguuuagggguuuggcuua

SEQ ID NO: 6660 - RNA, 21 nt, Artificial Sequence
  LDLR targeting guide sequence portion
ugaguuucucuccaccgugac

SEQ ID NO: 6661 - RNA, 21 nt, Artificial Sequence
  LDLR targeting guide sequence portion
ugaguuuggucucggugccac

SEQ ID NO: 6662 - RNA, 21 nt, Artificial Sequence
  LDLR targeting guide sequence portion
ugauaagccuuucugguuucg

SEQ ID NO: 6663 - RNA, 21 nt, Artificial Sequence
  LDLR targeting guide sequence portion
ugaucacaguaagacauucag

SEQ ID NO: 6664 - RNA, 21 nt, Artificial Sequence
  LDLR targeting guide sequence portion
ugauccagcucagccucccaa

SEQ ID NO: 6665 - RNA, 21 nt, Artificial Sequence
  LDLR targeting guide sequence portion
ugaucgugaauaucgagaacu

SEQ ID NO: 6666 - RNA, 21 nt, Artificial Sequence
  LDLR targeting guide sequence portion
ugaucuggcugaauccguggu

SEQ ID NO: 6667 - RNA, 21 nt, Artificial Sequence
  LDLR targeting guide sequence portion
ugaugccacuucccagaggca

SEQ ID NO: 6668 - RNA, 21 nt, Artificial Sequence
  LDLR targeting guide sequence portion
ugauggguauguguuuaaaac

SEQ ID NO: 6669 - RNA, 21 nt, Artificial Sequence
  LDLR targeting guide sequence portion
ugauguccccguuguauguau

SEQ ID NO: 6670 - RNA, 21 nt, Artificial Sequence
  LDLR targeting guide sequence portion
ugauguccggagagacaguga

SEQ ID NO: 6671 - RNA, 21 nt, Artificial Sequence
  LDLR targeting guide sequence portion
ugauuaugccacugcuuucca

SEQ ID NO: 6672 - RNA, 21 nt, Artificial Sequence
  LDLR targeting guide sequence portion
ugauucgggggugacagggca

SEQ ID NO: 6673 - RNA, 21 nt, Artificial Sequence
  LDLR targeting guide sequence portion
ugcaaacauaacaaaaaaucc

SEQ ID NO: 6674 - RNA, 21 nt, Artificial Sequence
  LDLR targeting guide sequence portion
ugcaaacccugguugcuguau

SEQ ID NO: 6675 - RNA, 21 nt, Artificial Sequence
  LDLR targeting guide sequence portion
ugcaaaugccuccaagccauu

SEQ ID NO: 6676 - RNA, 21 nt, Artificial Sequence
  LDLR targeting guide sequence portion
ugcaacaguaacacggcgauu

SEQ ID NO: 6677 - RNA, 21 nt, Artificial Sequence
  LDLR targeting guide sequence portion
ugcaacgcuuuuugggagaau

SEQ ID NO: 6678 - RNA, 21 nt, Artificial Sequence
  LDLR targeting guide sequence portion
ugcaagccuugcuagacagcc

SEQ ID NO: 6679 - RNA, 21 nt, Artificial Sequence
  LDLR targeting guide sequence portion
ugcaaggagaccacgggaaug

SEQ ID NO: 6680 - RNA, 21 nt, Artificial Sequence
  LDLR targeting guide sequence portion
ugcaauggcuuggguugggau

SEQ ID NO: 6681 - RNA, 21 nt, Artificial Sequence
  LDLR targeting guide sequence portion
ugcacacaguccaguucgugc

SEQ ID NO: 6682 - RNA, 21 nt, Artificial Sequence
  LDLR targeting guide sequence portion
ugcacccagguguggcuguca

SEQ ID NO: 6683 - RNA, 21 nt, Artificial Sequence
  LDLR targeting guide sequence portion
ugcacgaacuggacugugugc

SEQ ID NO: 6684 - RNA, 21 nt, Artificial Sequence
  LDLR targeting guide sequence portion
ugcacggugaggccgggcgca

SEQ ID NO: 6685 - RNA, 21 nt, Artificial Sequence
  LDLR targeting guide sequence portion
ugcacugauguccggagagac

SEQ ID NO: 6686 - RNA, 21 nt, Artificial Sequence
  LDLR targeting guide sequence portion
ugcacuguuuucugucgugug

SEQ ID NO: 6687 - RNA, 21 nt, Artificial Sequence
  LDLR targeting guide sequence portion
ugcacuuucucaguucagagu

SEQ ID NO: 6688 - RNA, 21 nt, Artificial Sequence
  LDLR targeting guide sequence portion
ugcacuuuguauauugguuga

SEQ ID NO: 6689 - RNA, 21 nt, Artificial Sequence
  LDLR targeting guide sequence portion
ugcaggccacguguccucacg

SEQ ID NO: 6690 - RNA, 21 nt, Artificial Sequence
  LDLR targeting guide sequence portion
ugcagggaaccgugauaagcc

SEQ ID NO: 6691 - RNA, 21 nt, Artificial Sequence
  LDLR targeting guide sequence portion
ugcauagaagagguaaacacg

SEQ ID NO: 6692 - RNA, 21 nt, Artificial Sequence
  LDLR targeting guide sequence portion
ugcauagaaguggaagcacua

SEQ ID NO: 6693 - RNA, 21 nt, Artificial Sequence
  LDLR targeting guide sequence portion
ugcaucagcagcccauggccu

SEQ ID NO: 6694 - RNA, 21 nt, Artificial Sequence
  LDLR targeting guide sequence portion
ugcaugggcacuguccgaagc

SEQ ID NO: 6695 - RNA, 21 nt, Artificial Sequence
  LDLR targeting guide sequence portion
ugcauggugcaucagcagccc

SEQ ID NO: 6696 - RNA, 21 nt, Artificial Sequence
  LDLR targeting guide sequence portion
ugcauguuuuaaacacauacc

SEQ ID NO: 6697 - RNA, 21 nt, Artificial Sequence
  LDLR targeting guide sequence portion
ugccaaauguacacaguguac

SEQ ID NO: 6698 - RNA, 21 nt, Artificial Sequence
  LDLR targeting guide sequence portion
ugccaaucccuugugacaucu

SEQ ID NO: 6699 - RNA, 21 nt, Artificial Sequence
  LDLR targeting guide sequence portion
ugccaccacggauucagccag

SEQ ID NO: 6700 - RNA, 21 nt, Artificial Sequence
  LDLR targeting guide sequence portion
ugccaccguacccagcugauu

SEQ ID NO: 6701 - RNA, 21 nt, Artificial Sequence
  LDLR targeting guide sequence portion
ugccacuucccagaggcagag

SEQ ID NO: 6702 - RNA, 21 nt, Artificial Sequence
  LDLR targeting guide sequence portion
ugccaucugcuguuguguguu

SEQ ID NO: 6703 - RNA, 21 nt, Artificial Sequence
  LDLR targeting guide sequence portion
ugccauugucgucuuuauguc

SEQ ID NO: 6704 - RNA, 21 nt, Artificial Sequence
  LDLR targeting guide sequence portion
ugcccagaacccuuccugaga

SEQ ID NO: 6705 - RNA, 21 nt, Artificial Sequence
  LDLR targeting guide sequence portion
ugcccaggcuggaaagcagug

SEQ ID NO: 6706 - RNA, 21 nt, Artificial Sequence
  LDLR targeting guide sequence portion
ugcccauccucccgaccccua

SEQ ID NO: 6707 - RNA, 21 nt, Artificial Sequence
  LDLR targeting guide sequence portion
ugcccaugcaauggcuugggu

SEQ ID NO: 6708 - RNA, 21 nt, Artificial Sequence
  LDLR targeting guide sequence portion
ugccccucucuguccccggca

SEQ ID NO: 6709 - RNA, 21 nt, Artificial Sequence
  LDLR targeting guide sequence portion
ugcccugucacccccgaauca

SEQ ID NO: 6710 - RNA, 21 nt, Artificial Sequence
  LDLR targeting guide sequence portion
ugccggggacagagaggggca

SEQ ID NO: 6711 - RNA, 21 nt, Artificial Sequence
  LDLR targeting guide sequence portion
ugccucauccaccaaucucua

SEQ ID NO: 6712 - RNA, 21 nt, Artificial Sequence
  LDLR targeting guide sequence portion
ugccuccaagccauucacuuc

SEQ ID NO: 6713 - RNA, 21 nt, Artificial Sequence
  LDLR targeting guide sequence portion
ugccucugaaaugccucuucu

SEQ ID NO: 6714 - RNA, 21 nt, Artificial Sequence
  LDLR targeting guide sequence portion
ugccucugggaaguggcauca

SEQ ID NO: 6715 - RNA, 21 nt, Artificial Sequence
  LDLR targeting guide sequence portion
ugccugagacacccgguuacc

SEQ ID NO: 6716 - RNA, 21 nt, Artificial Sequence
  LDLR targeting guide sequence portion
ugccugagcucaaaccauccu

SEQ ID NO: 6717 - RNA, 21 nt, Artificial Sequence
  LDLR targeting guide sequence portion
ugccugccagagcuuuguuuu

SEQ ID NO: 6718 - RNA, 21 nt, Artificial Sequence
  LDLR targeting guide sequence portion
ugccuggagucccgucccugc

SEQ ID NO: 6719 - RNA, 21 nt, Artificial Sequence
  LDLR targeting guide sequence portion
ugccuggccagaggccauggg

SEQ ID NO: 6720 - RNA, 21 nt, Artificial Sequence
  LDLR targeting guide sequence portion
ugcgcccggccucaccgugca

SEQ ID NO: 6721 - RNA, 21 nt, Artificial Sequence
  LDLR targeting guide sequence portion
ugcgucccuguacagauagug

SEQ ID NO: 6722 - RNA, 21 nt, Artificial Sequence
  LDLR targeting guide sequence portion
ugcuagacagccagguuagcc

SEQ ID NO: 6723 - RNA, 21 nt, Artificial Sequence
  LDLR targeting guide sequence portion
ugcucaggccuggucuccaac

SEQ ID NO: 6724 - RNA, 21 nt, Artificial Sequence
  LDLR targeting guide sequence portion
ugcuccgaaaccagaaaggcu

SEQ ID NO: 6725 - RNA, 21 nt, Artificial Sequence
  LDLR targeting guide sequence portion
ugcuguauuuguucagugacu

SEQ ID NO: 6726 - RNA, 21 nt, Artificial Sequence
  LDLR targeting guide sequence portion
ugcuguuguguguugaaagcc

SEQ ID NO: 6727 - RNA, 21 nt, Artificial Sequence
  LDLR targeting guide sequence portion
ugcuuccacuucuaugcaaau

SEQ ID NO: 6728 - RNA, 21 nt, Artificial Sequence
  LDLR targeting guide sequence portion
ugcuucucugggccugacauc

SEQ ID NO: 6729 - RNA, 21 nt, Artificial Sequence
  LDLR targeting guide sequence portion
ugcuuuccagccugggcaaca

SEQ ID NO: 6730 - RNA, 21 nt, Artificial Sequence
  LDLR targeting guide sequence portion
ugcuuuggucuucucugucuu

SEQ ID NO: 6731 - RNA, 21 nt, Artificial Sequence
  LDLR targeting guide sequence portion
uggaaagcaguggcauaauca

SEQ ID NO: 6732 - RNA, 21 nt, Artificial Sequence
  LDLR targeting guide sequence portion
uggaagaugaaaggggagggg

SEQ ID NO: 6733 - RNA, 21 nt, Artificial Sequence
  LDLR targeting guide sequence portion
uggaagcacuaggugggcgga

SEQ ID NO: 6734 - RNA, 21 nt, Artificial Sequence
  LDLR targeting guide sequence portion
uggaaguggguaggggucggg

SEQ ID NO: 6735 - RNA, 21 nt, Artificial Sequence
  LDLR targeting guide sequence portion
uggacugugugcaacgcuuuu

SEQ ID NO: 6736 - RNA, 21 nt, Artificial Sequence
  LDLR targeting guide sequence portion
uggagaccaggccugagcaac

SEQ ID NO: 6737 - RNA, 21 nt, Artificial Sequence
  LDLR targeting guide sequence portion
uggagagaaacucaaaacuuc

SEQ ID NO: 6738 - RNA, 21 nt, Artificial Sequence
  LDLR targeting guide sequence portion
uggagagaaauggagguguca

SEQ ID NO: 6739 - RNA, 21 nt, Artificial Sequence
  LDLR targeting guide sequence portion
uggaggaugacguggcgugaa

SEQ ID NO: 6740 - RNA, 21 nt, Artificial Sequence
  LDLR targeting guide sequence portion
uggaggcauuugcauagaagu

SEQ ID NO: 6741 - RNA, 21 nt, Artificial Sequence
  LDLR targeting guide sequence portion
uggaggugucauccugguccc

SEQ ID NO: 6742 - RNA, 21 nt, Artificial Sequence
  LDLR targeting guide sequence portion
uggagguugcagugagccaug

SEQ ID NO: 6743 - RNA, 21 nt, Artificial Sequence
  LDLR targeting guide sequence portion
uggagucccgucccugcccag

SEQ ID NO: 6744 - RNA, 21 nt, Artificial Sequence
  LDLR targeting guide sequence portion
uggaucguuugacgggacuuc

SEQ ID NO: 6745 - RNA, 21 nt, Artificial Sequence
  LDLR targeting guide sequence portion
uggaugaggcagggccagggg

SEQ ID NO: 6746 - RNA, 21 nt, Artificial Sequence
  LDLR targeting guide sequence portion
uggcaauuguccccagggaca

SEQ ID NO: 6747 - RNA, 21 nt, Artificial Sequence
  LDLR targeting guide sequence portion
uggcaccaacgggacccccug

SEQ ID NO: 6748 - RNA, 21 nt, Artificial Sequence
  LDLR targeting guide sequence portion
uggcaccgagaccaaacucau

SEQ ID NO: 6749 - RNA, 21 nt, Artificial Sequence
  LDLR targeting guide sequence portion
uggcaggcaaugcuuuggucu

SEQ ID NO: 6750 - RNA, 21 nt, Artificial Sequence
  LDLR targeting guide sequence portion
uggcaguucucgauauucacg

SEQ ID NO: 6751 - RNA, 21 nt, Artificial Sequence
  LDLR targeting guide sequence portion
uggcaucauuuggugaaugag

SEQ ID NO: 6752 - RNA, 21 nt, Artificial Sequence
  LDLR targeting guide sequence portion
uggcauuuguguuauuauuuu

SEQ ID NO: 6753 - RNA, 21 nt, Artificial Sequence
  LDLR targeting guide sequence portion
uggccaaauucauuuuuuaag

SEQ ID NO: 6754 - RNA, 21 nt, Artificial Sequence
  LDLR targeting guide sequence portion
uggccagacacaggugccuca

SEQ ID NO: 6755 - RNA, 21 nt, Artificial Sequence
  LDLR targeting guide sequence portion
uggccagaggccaugggcugc

SEQ ID NO: 6756 - RNA, 21 nt, Artificial Sequence
  LDLR targeting guide sequence portion
uggccaggcauggcgaggcug

SEQ ID NO: 6757 - RNA, 21 nt, Artificial Sequence
  LDLR targeting guide sequence portion
uggcccugccucauccaccaa

SEQ ID NO: 6758 - RNA, 21 nt, Artificial Sequence
  LDLR targeting guide sequence portion
uggccgugaggacacguggcc

SEQ ID NO: 6759 - RNA, 21 nt, Artificial Sequence
  LDLR targeting guide sequence portion
uggccucuggccaggcauggc

SEQ ID NO: 6760 - RNA, 21 nt, Artificial Sequence
  LDLR targeting guide sequence portion
uggccugcacccagguguggc

SEQ ID NO: 6761 - RNA, 21 nt, Artificial Sequence
  LDLR targeting guide sequence portion
uggccugggaucccaucccaa

SEQ ID NO: 6762 - RNA, 21 nt, Artificial Sequence
  LDLR targeting guide sequence portion
uggcgaggcugaggugggagg

SEQ ID NO: 6763 - RNA, 21 nt, Artificial Sequence
  LDLR targeting guide sequence portion
uggcgucggaaaugaucuggc

SEQ ID NO: 6764 - RNA, 21 nt, Artificial Sequence
  LDLR targeting guide sequence portion
uggcgugaacaucugccugga

SEQ ID NO: 6765 - RNA, 21 nt, Artificial Sequence
  LDLR targeting guide sequence portion
uggcugaauccgugguggcac

SEQ ID NO: 6766 - RNA, 21 nt, Artificial Sequence
  LDLR targeting guide sequence portion
uggcugucaggacaccagccu

SEQ ID NO: 6767 - RNA, 21 nt, Artificial Sequence
  LDLR targeting guide sequence portion
uggcugucuagcaaggcuugc

SEQ ID NO: 6768 - RNA, 21 nt, Artificial Sequence
  LDLR targeting guide sequence portion
uggcuuaaggaagguacaaac

SEQ ID NO: 6769 - RNA, 21 nt, Artificial Sequence
  LDLR targeting guide sequence portion
uggcuuagagauugguggaug

SEQ ID NO: 6770 - RNA, 21 nt, Artificial Sequence
  LDLR targeting guide sequence portion
uggcuucugggagaugggugu

SEQ ID NO: 6771 - RNA, 21 nt, Artificial Sequence
  LDLR targeting guide sequence portion
uggcuuggaggcauuugcaua

SEQ ID NO: 6772 - RNA, 21 nt, Artificial Sequence
  LDLR targeting guide sequence portion
uggcuuggguugggauuuugg

SEQ ID NO: 6773 - RNA, 21 nt, Artificial Sequence
  LDLR targeting guide sequence portion
uggcuuucaacacacaacagc

SEQ ID NO: 6774 - RNA, 21 nt, Artificial Sequence
  LDLR targeting guide sequence portion
ugggaaguggcaucauuuggu

SEQ ID NO: 6775 - RNA, 21 nt, Artificial Sequence
  LDLR targeting guide sequence portion
ugggagaaugauguccccguu

SEQ ID NO: 6776 - RNA, 21 nt, Artificial Sequence
  LDLR targeting guide sequence portion
ugggagaugggugucacuuuu

SEQ ID NO: 6777 - RNA, 21 nt, Artificial Sequence
  LDLR targeting guide sequence portion
ugggaggaugguuugagcuca

SEQ ID NO: 6778 - RNA, 21 nt, Artificial Sequence
  LDLR targeting guide sequence portion
ugggaggcagaacaggcuucg

SEQ ID NO: 6779 - RNA, 21 nt, Artificial Sequence
  LDLR targeting guide sequence portion
ugggaggcugagcuggaucac

SEQ ID NO: 6780 - RNA, 21 nt, Artificial Sequence
  LDLR targeting guide sequence portion
ugggaucccaggccagggaaa

SEQ ID NO: 6781 - RNA, 21 nt, Artificial Sequence
  LDLR targeting guide sequence portion
ugggaucccaucccaacacac

SEQ ID NO: 6782 - RNA, 21 nt, Artificial Sequence
  LDLR targeting guide sequence portion
ugggaucucgcuuuguugcuc

SEQ ID NO: 6783 - RNA, 21 nt, Artificial Sequence
  LDLR targeting guide sequence portion
ugggaugggaucccaggccag

SEQ ID NO: 6784 - RNA, 21 nt, Artificial Sequence
  LDLR targeting guide sequence portion
ugggauuuugguuucuuccuu

SEQ ID NO: 6785 - RNA, 21 nt, Artificial Sequence
  LDLR targeting guide sequence portion
ugggcaccaggcugguguccu

SEQ ID NO: 6786 - RNA, 21 nt, Artificial Sequence
  LDLR targeting guide sequence portion
ugggcacuguccgaagccugu

SEQ ID NO: 6787 - RNA, 21 nt, Artificial Sequence
  LDLR targeting guide sequence portion
ugggcagggacgggacuccag

SEQ ID NO: 6788 - RNA, 21 nt, Artificial Sequence
  LDLR targeting guide sequence portion
ugggccugacauccccucccc

SEQ ID NO: 6789 - RNA, 21 nt, Artificial Sequence
  LDLR targeting guide sequence portion
ugggcggacauaaagacgaca

SEQ ID NO: 6790 - RNA, 21 nt, Artificial Sequence
  LDLR targeting guide sequence portion
ugggcugcugaugcaccaugc

SEQ ID NO: 6791 - RNA, 21 nt, Artificial Sequence
  LDLR targeting guide sequence portion
uggggaagugaauggcuugga

SEQ ID NO: 6792 - RNA, 21 nt, Artificial Sequence
  LDLR targeting guide sequence portion
uggggacaauugccaaucccu

SEQ ID NO: 6793 - RNA, 21 nt, Artificial Sequence
  LDLR targeting guide sequence portion
uggggauuuuuuguuauguuu

SEQ ID NO: 6794 - RNA, 21 nt, Artificial Sequence
  LDLR targeting guide sequence portion
uggguacgguggcacgugccu

SEQ ID NO: 6795 - RNA, 21 nt, Artificial Sequence
  LDLR targeting guide sequence portion
uggguaggggucgggaggaug

SEQ ID NO: 6796 - RNA, 21 nt, Artificial Sequence
  LDLR targeting guide sequence portion
uggguauguguuuaaaacaug

SEQ ID NO: 6797 - RNA, 21 nt, Artificial Sequence
  LDLR targeting guide sequence portion
ugggucaugauucggggguga

SEQ ID NO: 6798 - RNA, 21 nt, Artificial Sequence
  LDLR targeting guide sequence portion
ugggugcaggccacguguccu

SEQ ID NO: 6799 - RNA, 21 nt, Artificial Sequence
  LDLR targeting guide sequence portion
ugggugggucaugauucgggg

SEQ ID NO: 6800 - RNA, 21 nt, Artificial Sequence
  LDLR targeting guide sequence portion
ugggugucacuuuuuaaacca

SEQ ID NO: 6801 - RNA, 21 nt, Artificial Sequence
  LDLR targeting guide sequence portion
uggguugggauuuugguuucu

SEQ ID NO: 6802 - RNA, 21 nt, Artificial Sequence
  LDLR targeting guide sequence portion
uggguuuguaccuuccuuaag

SEQ ID NO: 6803 - RNA, 21 nt, Artificial Sequence
  LDLR targeting guide sequence portion
uggucacccuuaauauuuauu

SEQ ID NO: 6804 - RNA, 21 nt, Artificial Sequence
  LDLR targeting guide sequence portion
uggucagucuggaggaugacg

SEQ ID NO: 6805 - RNA, 21 nt, Artificial Sequence
  LDLR targeting guide sequence portion
ugguccccccgggccuguuuc

SEQ ID NO: 6806 - RNA, 21 nt, Artificial Sequence
  LDLR targeting guide sequence portion
uggucuccuugcacuuucuca

SEQ ID NO: 6807 - RNA, 21 nt, Artificial Sequence
  LDLR targeting guide sequence portion
uggucucggugccaccacgga

SEQ ID NO: 6808 - RNA, 21 nt, Artificial Sequence
  LDLR targeting guide sequence portion
uggucuucucugucuuugaau

SEQ ID NO: 6809 - RNA, 21 nt, Artificial Sequence
  LDLR targeting guide sequence portion
uggugaaugaguuuggucucg

SEQ ID NO: 6810 - RNA, 21 nt, Artificial Sequence
  LDLR targeting guide sequence portion
uggugcaucagcagcccaugg

SEQ ID NO: 6811 - RNA, 21 nt, Artificial Sequence
  LDLR targeting guide sequence portion
uggugccaucugcuguugugu

SEQ ID NO: 6812 - RNA, 21 nt, Artificial Sequence
  LDLR targeting guide sequence portion
uggugcccauccucccgaccc

SEQ ID NO: 6813 - RNA, 21 nt, Artificial Sequence
  LDLR targeting guide sequence portion
ugguggaugaggcagggccag

SEQ ID NO: 6814 - RNA, 21 nt, Artificial Sequence
  LDLR targeting guide sequence portion
ugguggcaccgagaccaaacu

SEQ ID NO: 6815 - RNA, 21 nt, Artificial Sequence
  LDLR targeting guide sequence portion
ugguguccugacagccacacc

SEQ ID NO: 6816 - RNA, 21 nt, Artificial Sequence
  LDLR targeting guide sequence portion
ugguugcuguauuuguucagu

SEQ ID NO: 6817 - RNA, 21 nt, Artificial Sequence
  LDLR targeting guide sequence portion
ugguuuaaaaagugacaccca

SEQ ID NO: 6818 - RNA, 21 nt, Artificial Sequence
  LDLR targeting guide sequence portion
ugguuucggagcacguaaaug

SEQ ID NO: 6819 - RNA, 21 nt, Artificial Sequence
  LDLR targeting guide sequence portion
ugguuucuuccuuuccucgug

SEQ ID NO: 6820 - RNA, 21 nt, Artificial Sequence
  LDLR targeting guide sequence portion
ugguuugagcucaggcauuug

SEQ ID NO: 6821 - RNA, 21 nt, Artificial Sequence
  LDLR targeting guide sequence portion
ugguuuuuguagagaugggau

SEQ ID NO: 6822 - RNA, 21 nt, Artificial Sequence
  LDLR targeting guide sequence portion
uguacaaagauuauuugcacg

SEQ ID NO: 6823 - RNA, 21 nt, Artificial Sequence
  LDLR targeting guide sequence portion
uguacaacucugaacugagaa

SEQ ID NO: 6824 - RNA, 21 nt, Artificial Sequence
  LDLR targeting guide sequence portion
uguacacaguguacaacucug

SEQ ID NO: 6825 - RNA, 21 nt, Artificial Sequence
  LDLR targeting guide sequence portion
uguacacuguguacauuuggc

SEQ ID NO: 6826 - RNA, 21 nt, Artificial Sequence
  LDLR targeting guide sequence portion
uguacagauaguggggauuuu

SEQ ID NO: 6827 - RNA, 21 nt, Artificial Sequence
  LDLR targeting guide sequence portion
uguacagggacgcauuuacgu

SEQ ID NO: 6828 - RNA, 21 nt, Artificial Sequence
  LDLR targeting guide sequence portion
uguacauaaagaagaggcauu

SEQ ID NO: 6829 - RNA, 21 nt, Artificial Sequence
  LDLR targeting guide sequence portion
uguaccuuccuuaagccagga

SEQ ID NO: 6830 - RNA, 21 nt, Artificial Sequence
  LDLR targeting guide sequence portion
uguagccugaaugucuuacug

SEQ ID NO: 6831 - RNA, 21 nt, Artificial Sequence
  LDLR targeting guide sequence portion
uguaggggguuauugccucug

SEQ ID NO: 6832 - RNA, 21 nt, Artificial Sequence
  LDLR targeting guide sequence portion
uguauagaagguuuuuguagc

SEQ ID NO: 6833 - RNA, 21 nt, Artificial Sequence
  LDLR targeting guide sequence portion
uguaugaguggcuucugggag

SEQ ID NO: 6834 - RNA, 21 nt, Artificial Sequence
  LDLR targeting guide sequence portion
uguauguaugaguggcuucug

SEQ ID NO: 6835 - RNA, 21 nt, Artificial Sequence
  LDLR targeting guide sequence portion
uguauuucugaaauagggucu

SEQ ID NO: 6836 - RNA, 21 nt, Artificial Sequence
  LDLR targeting guide sequence portion
uguauuuguucagugacuauu

SEQ ID NO: 6837 - RNA, 21 nt, Artificial Sequence
  LDLR targeting guide sequence portion
ugucaaugaaugccggggaca

SEQ ID NO: 6838 - RNA, 21 nt, Artificial Sequence
  LDLR targeting guide sequence portion
ugucacaagggauuggcaauu

SEQ ID NO: 6839 - RNA, 21 nt, Artificial Sequence
  LDLR targeting guide sequence portion
ugucacccccgaaucaugacc

SEQ ID NO: 6840 - RNA, 21 nt, Artificial Sequence
  LDLR targeting guide sequence portion
ugucacgguggagagaaacuc

SEQ ID NO: 6841 - RNA, 21 nt, Artificial Sequence
  LDLR targeting guide sequence portion
ugucacugucucuccggacau

SEQ ID NO: 6842 - RNA, 21 nt, Artificial Sequence
  LDLR targeting guide sequence portion
ugucaggacaccagccuggug

SEQ ID NO: 6843 - RNA, 21 nt, Artificial Sequence
  LDLR targeting guide sequence portion
ugucaggcccagagaagcaag

SEQ ID NO: 6844 - RNA, 21 nt, Artificial Sequence
  LDLR targeting guide sequence portion
ugucauccugguccccccggg

SEQ ID NO: 6845 - RNA, 21 nt, Artificial Sequence
  LDLR targeting guide sequence portion
uguccccagggacaaaacacu

SEQ ID NO: 6846 - RNA, 21 nt, Artificial Sequence
  LDLR targeting guide sequence portion
uguccccggcauucauugaca

SEQ ID NO: 6847 - RNA, 21 nt, Artificial Sequence
  LDLR targeting guide sequence portion
uguccccguuguauguaugag

SEQ ID NO: 6848 - RNA, 21 nt, Artificial Sequence
  LDLR targeting guide sequence portion
ugucccuggggacaauugcca

SEQ ID NO: 6849 - RNA, 21 nt, Artificial Sequence
  LDLR targeting guide sequence portion
uguccgaagccuguucugccu

SEQ ID NO: 6850 - RNA, 21 nt, Artificial Sequence
  LDLR targeting guide sequence portion
uguccgcccaccuagugcuuc

SEQ ID NO: 6851 - RNA, 21 nt, Artificial Sequence
  LDLR targeting guide sequence portion
uguccggagagacagugacag

SEQ ID NO: 6852 - RNA, 21 nt, Artificial Sequence
  LDLR targeting guide sequence portion
uguccucacggccaagguaac

SEQ ID NO: 6853 - RNA, 21 nt, Artificial Sequence
  LDLR targeting guide sequence portion
uguccugacagccacaccugg

SEQ ID NO: 6854 - RNA, 21 nt, Artificial Sequence
  LDLR targeting guide sequence portion
ugucgucuuuauguccgccca

SEQ ID NO: 6855 - RNA, 21 nt, Artificial Sequence
  LDLR targeting guide sequence portion
ugucgugagcuaugauuaugc

SEQ ID NO: 6856 - RNA, 21 nt, Artificial Sequence
  LDLR targeting guide sequence portion
ugucguguguguugggauggg

SEQ ID NO: 6857 - RNA, 21 nt, Artificial Sequence
  LDLR targeting guide sequence portion
ugucguugauggguauguguu

SEQ ID NO: 6858 - RNA, 21 nt, Artificial Sequence
  LDLR targeting guide sequence portion
ugucuagcaaggcuugcauag

SEQ ID NO: 6859 - RNA, 21 nt, Artificial Sequence
  LDLR targeting guide sequence portion
ugucucuccggacaucagugc

SEQ ID NO: 6860 - RNA, 21 nt, Artificial Sequence
  LDLR targeting guide sequence portion
ugucuggccaaauucauuuuu

SEQ ID NO: 6861 - RNA, 21 nt, Artificial Sequence
  LDLR targeting guide sequence portion
ugucuuucgagguggguuugu

SEQ ID NO: 6862 - RNA, 21 nt, Artificial Sequence
  LDLR targeting guide sequence portion
ugucuuugaauaaaacaaggc

SEQ ID NO: 6863 - RNA, 21 nt, Artificial Sequence
  LDLR targeting guide sequence portion
ugugacaucuucacgcgggag

SEQ ID NO: 6864 - RNA, 21 nt, Artificial Sequence
  LDLR targeting guide sequence portion
ugugcaacgcuuuuugggaga

SEQ ID NO: 6865 - RNA, 21 nt, Artificial Sequence
  LDLR targeting guide sequence portion
uguggcugucaggacaccagc

SEQ ID NO: 6866 - RNA, 21 nt, Artificial Sequence
  LDLR targeting guide sequence portion
uguguaggggguuauugccuc

SEQ ID NO: 6867 - RNA, 21 nt, Artificial Sequence
  LDLR targeting guide sequence portion
ugugucacgguggagagaaac

SEQ ID NO: 6868 - RNA, 21 nt, Artificial Sequence
  LDLR targeting guide sequence portion
ugugucuggccaaauucauuu

SEQ ID NO: 6869 - RNA, 21 nt, Artificial Sequence
  LDLR targeting guide sequence portion
ugugugcaacgcuuuuuggga

SEQ ID NO: 6870 - RNA, 21 nt, Artificial Sequence
  LDLR targeting guide sequence portion
uguguguugaaagccacuugc

SEQ ID NO: 6871 - RNA, 21 nt, Artificial Sequence
  LDLR targeting guide sequence portion
uguguguugggaugggauccc

SEQ ID NO: 6872 - RNA, 21 nt, Artificial Sequence
  LDLR targeting guide sequence portion
uguguugaaagccacuugcuu

SEQ ID NO: 6873 - RNA, 21 nt, Artificial Sequence
  LDLR targeting guide sequence portion
uguguugggaugggaucccag

SEQ ID NO: 6874 - RNA, 21 nt, Artificial Sequence
  LDLR targeting guide sequence portion
uguguuuaaaacaugcacggu

SEQ ID NO: 6875 - RNA, 21 nt, Artificial Sequence
  LDLR targeting guide sequence portion
uguuacuguugcacugauguc

SEQ ID NO: 6876 - RNA, 21 nt, Artificial Sequence
  LDLR targeting guide sequence portion
uguucacgccacgucauccuc

SEQ ID NO: 6877 - RNA, 21 nt, Artificial Sequence
  LDLR targeting guide sequence portion
uguucagugacuauucucggg

SEQ ID NO: 6878 - RNA, 21 nt, Artificial Sequence
  LDLR targeting guide sequence portion
uguucugccucccagaugaau

SEQ ID NO: 6879 - RNA, 21 nt, Artificial Sequence
  LDLR targeting guide sequence portion
uguugaaagccacuugcuucu

SEQ ID NO: 6880 - RNA, 21 nt, Artificial Sequence
  LDLR targeting guide sequence portion
uguugcacugauguccggaga

SEQ ID NO: 6881 - RNA, 21 nt, Artificial Sequence
  LDLR targeting guide sequence portion
uguugcucaggccuggucucc

SEQ ID NO: 6882 - RNA, 21 nt, Artificial Sequence
  LDLR targeting guide sequence portion
uguugggaugggaucccaggc

SEQ ID NO: 6883 - RNA, 21 nt, Artificial Sequence
  LDLR targeting guide sequence portion
uguuguguguugaaagccacu

SEQ ID NO: 6884 - RNA, 21 nt, Artificial Sequence
  LDLR targeting guide sequence portion
uguuuaaaacaugcacgguga

SEQ ID NO: 6885 - RNA, 21 nt, Artificial Sequence
  LDLR targeting guide sequence portion
uguuuaccucuucuaugcaag

SEQ ID NO: 6886 - RNA, 21 nt, Artificial Sequence
  LDLR targeting guide sequence portion
uguuucucuuauccuucacga

SEQ ID NO: 6887 - RNA, 21 nt, Artificial Sequence
  LDLR targeting guide sequence portion
uguuugaggauugugucacgg

SEQ ID NO: 6888 - RNA, 21 nt, Artificial Sequence
  LDLR targeting guide sequence portion
uguuuuaaacacauacccauc

SEQ ID NO: 6889 - RNA, 21 nt, Artificial Sequence
  LDLR targeting guide sequence portion
uguuuuauucaaagacagaga

SEQ ID NO: 6890 - RNA, 21 nt, Artificial Sequence
  LDLR targeting guide sequence portion
uguuuucugucguguguguug

SEQ ID NO: 6891 - RNA, 21 nt, Artificial Sequence
  LDLR targeting guide sequence portion
uguuuugucccuggggacaau

SEQ ID NO: 6892 - RNA, 21 nt, Artificial Sequence
  LDLR targeting guide sequence portion
uuaaaaaaugaauuuggccag

SEQ ID NO: 6893 - RNA, 21 nt, Artificial Sequence
  LDLR targeting guide sequence portion
uuaaaaagugacacccaucuc

SEQ ID NO: 6894 - RNA, 21 nt, Artificial Sequence
  LDLR targeting guide sequence portion
uuaaaaaucagcuggguacgg

SEQ ID NO: 6895 - RNA, 21 nt, Artificial Sequence
  LDLR targeting guide sequence portion
uuaaaacaugcacggugaggc

SEQ ID NO: 6896 - RNA, 21 nt, Artificial Sequence
  LDLR targeting guide sequence portion
uuaaacacauacccaucaacg

SEQ ID NO: 6897 - RNA, 21 nt, Artificial Sequence
  LDLR targeting guide sequence portion
uuaagccaggaaagggauuca

SEQ ID NO: 6898 - RNA, 21 nt, Artificial Sequence
  LDLR targeting guide sequence portion
uuaaggaagguacaaacccac

SEQ ID NO: 6899 - RNA, 21 nt, Artificial Sequence
  LDLR targeting guide sequence portion
uuaagggugaccagugacuca

SEQ ID NO: 6900 - RNA, 21 nt, Artificial Sequence
  LDLR targeting guide sequence portion
uuaagugccugagacacccgg

SEQ ID NO: 6901 - RNA, 21 nt, Artificial Sequence
  LDLR targeting guide sequence portion
uuaauugaucacaguaagaca

SEQ ID NO: 6902 - RNA, 21 nt, Artificial Sequence
  LDLR targeting guide sequence portion
uuacaggcgugaggcaccugu

SEQ ID NO: 6903 - RNA, 21 nt, Artificial Sequence
  LDLR targeting guide sequence portion
uuaccucuucuaugcaagccu

SEQ ID NO: 6904 - RNA, 21 nt, Artificial Sequence
  LDLR targeting guide sequence portion
uuaccuuggccgugaggacac

SEQ ID NO: 6905 - RNA, 21 nt, Artificial Sequence
  LDLR targeting guide sequence portion
uuacgugcuccgaaaccagaa

SEQ ID NO: 6906 - RNA, 21 nt, Artificial Sequence
  LDLR targeting guide sequence portion
uuacuauguugcccaggcugg

SEQ ID NO: 6907 - RNA, 21 nt, Artificial Sequence
  LDLR targeting guide sequence portion
uuacuguugcacugauguccg

SEQ ID NO: 6908 - RNA, 21 nt, Artificial Sequence
  LDLR targeting guide sequence portion
uuagagauugguggaugaggc

SEQ ID NO: 6909 - RNA, 21 nt, Artificial Sequence
  LDLR targeting guide sequence portion
uuagccuuugcccugucaccc

SEQ ID NO: 6910 - RNA, 21 nt, Artificial Sequence
  LDLR targeting guide sequence portion
uuagggguuuggcuuagagau

SEQ ID NO: 6911 - RNA, 21 nt, Artificial Sequence
  LDLR targeting guide sequence portion
uuauauauuuauucaucuggg

SEQ ID NO: 6912 - RNA, 21 nt, Artificial Sequence
  LDLR targeting guide sequence portion
uuauccuucacgaggaaagga

SEQ ID NO: 6913 - RNA, 21 nt, Artificial Sequence
  LDLR targeting guide sequence portion
uuaugccacugcuuuccagcc

SEQ ID NO: 6914 - RNA, 21 nt, Artificial Sequence
  LDLR targeting guide sequence portion
uuauguccgcccaccuagugc

SEQ ID NO: 6915 - RNA, 21 nt, Artificial Sequence
  LDLR targeting guide sequence portion
uuauuaagugccugagacacc

SEQ ID NO: 6916 - RNA, 21 nt, Artificial Sequence
  LDLR targeting guide sequence portion
uuauucaaagacagagaagac

SEQ ID NO: 6917 - RNA, 21 nt, Artificial Sequence
  LDLR targeting guide sequence portion
uuauucaucugggaggcagaa

SEQ ID NO: 6918 - RNA, 21 nt, Artificial Sequence
  LDLR targeting guide sequence portion
uuauugccucugaaaugccuc

SEQ ID NO: 6919 - RNA, 21 nt, Artificial Sequence
  LDLR targeting guide sequence portion
uuauuugcacgaacuggacug

SEQ ID NO: 6920 - RNA, 21 nt, Artificial Sequence
  LDLR targeting guide sequence portion
uuauuuugcacuguuuucugu

SEQ ID NO: 6921 - RNA, 21 nt, Artificial Sequence
  LDLR targeting guide sequence portion
uuauuuuugcaaacccugguu

SEQ ID NO: 6922 - RNA, 21 nt, Artificial Sequence
  LDLR targeting guide sequence portion
uucaaagacagagaagaccaa

SEQ ID NO: 6923 - RNA, 21 nt, Artificial Sequence
  LDLR targeting guide sequence portion
uucaaagccgugaucgugaau

SEQ ID NO: 6924 - RNA, 21 nt, Artificial Sequence
  LDLR targeting guide sequence portion
uucaacacacaacagcagaug

SEQ ID NO: 6925 - RNA, 21 nt, Artificial Sequence
  LDLR targeting guide sequence portion
uucaccaaaugaugccacuuc

SEQ ID NO: 6926 - RNA, 21 nt, Artificial Sequence
  LDLR targeting guide sequence portion
uucacgaggaaaggaagaaac

SEQ ID NO: 6927 - RNA, 21 nt, Artificial Sequence
  LDLR targeting guide sequence portion
uucacgaucacggcuuugaag

SEQ ID NO: 6928 - RNA, 21 nt, Artificial Sequence
  LDLR targeting guide sequence portion
uucacgccacgucauccucca

SEQ ID NO: 6929 - RNA, 21 nt, Artificial Sequence
  LDLR targeting guide sequence portion
uucacgcgggagucugacgga

SEQ ID NO: 6930 - RNA, 21 nt, Artificial Sequence
  LDLR targeting guide sequence portion
uucacuuccccaaucuugucg

SEQ ID NO: 6931 - RNA, 21 nt, Artificial Sequence
  LDLR targeting guide sequence portion
uucagaaagaaccugaagucc

SEQ ID NO: 6932 - RNA, 21 nt, Artificial Sequence
  LDLR targeting guide sequence portion
uucagaggcaauaacccccua

SEQ ID NO: 6933 - RNA, 21 nt, Artificial Sequence
  LDLR targeting guide sequence portion
uucagaguuguacacugugua

SEQ ID NO: 6934 - RNA, 21 nt, Artificial Sequence
  LDLR targeting guide sequence portion
uucagccagaucauuuccgac

SEQ ID NO: 6935 - RNA, 21 nt, Artificial Sequence
  LDLR targeting guide sequence portion
uucaggaguuggagaccaggc

SEQ ID NO: 6936 - RNA, 21 nt, Artificial Sequence
  LDLR targeting guide sequence portion
uucagguucuuucugaaaucg

SEQ ID NO: 6937 - RNA, 21 nt, Artificial Sequence
  LDLR targeting guide sequence portion
uucagugacuauucucggggc

SEQ ID NO: 6938 - RNA, 21 nt, Artificial Sequence
  LDLR targeting guide sequence portion
uucaucugggaggcagaacag

SEQ ID NO: 6939 - RNA, 21 nt, Artificial Sequence
  LDLR targeting guide sequence portion
uucaucuuccauguuugagga

SEQ ID NO: 6940 - RNA, 21 nt, Artificial Sequence
  LDLR targeting guide sequence portion
uucauggcgucggaaaugauc

SEQ ID NO: 6941 - RNA, 21 nt, Artificial Sequence
  LDLR targeting guide sequence portion
uucauugacacgggcuuuccc

SEQ ID NO: 6942 - RNA, 21 nt, Artificial Sequence
  LDLR targeting guide sequence portion
uucauuuuuuaagagaugggg

SEQ ID NO: 6943 - RNA, 21 nt, Artificial Sequence
  LDLR targeting guide sequence portion
uuccacuucuaugcaaaugcc

SEQ ID NO: 6944 - RNA, 21 nt, Artificial Sequence
  LDLR targeting guide sequence portion
uuccauguuugaggauugugu

SEQ ID NO: 6945 - RNA, 21 nt, Artificial Sequence
  LDLR targeting guide sequence portion
uuccauucccguggucuccuu

SEQ ID NO: 6946 - RNA, 21 nt, Artificial Sequence
  LDLR targeting guide sequence portion
uucccagaggcagagccugag

SEQ ID NO: 6947 - RNA, 21 nt, Artificial Sequence
  LDLR targeting guide sequence portion
uuccccaaucuugucguugau

SEQ ID NO: 6948 - RNA, 21 nt, Artificial Sequence
  LDLR targeting guide sequence portion
uucccguggucuccuugcacu

SEQ ID NO: 6949 - RNA, 21 nt, Artificial Sequence
  LDLR targeting guide sequence portion
uucccuggccugggaucccau

SEQ ID NO: 6950 - RNA, 21 nt, Artificial Sequence
  LDLR targeting guide sequence portion
uuccgacgccaugaaucccuu

SEQ ID NO: 6951 - RNA, 21 nt, Artificial Sequence
  LDLR targeting guide sequence portion
uuccucgugaaggauaagaga

SEQ ID NO: 6952 - RNA, 21 nt, Artificial Sequence
  LDLR targeting guide sequence portion
uuccugagaccucgccggccu

SEQ ID NO: 6953 - RNA, 21 nt, Artificial Sequence
  LDLR targeting guide sequence portion
uuccuggagagaaauggaggu

SEQ ID NO: 6954 - RNA, 21 nt, Artificial Sequence
  LDLR targeting guide sequence portion
uuccuggcuuaaggaagguac

SEQ ID NO: 6955 - RNA, 21 nt, Artificial Sequence
  LDLR targeting guide sequence portion
uuccuuaagccaggaaaggga

SEQ ID NO: 6956 - RNA, 21 nt, Artificial Sequence
  LDLR targeting guide sequence portion
uuccuuuccucgugaaggaua

SEQ ID NO: 6957 - RNA, 21 nt, Artificial Sequence
  LDLR targeting guide sequence portion
uucgagguggguuuguaccuu

SEQ ID NO: 6958 - RNA, 21 nt, Artificial Sequence
  LDLR targeting guide sequence portion
uucggacagugcccaugcaau

SEQ ID NO: 6959 - RNA, 21 nt, Artificial Sequence
  LDLR targeting guide sequence portion
uucggagcacguaaaugcguc

SEQ ID NO: 6960 - RNA, 21 nt, Artificial Sequence
  LDLR targeting guide sequence portion
uucgggggugacagggcaaag

SEQ ID NO: 6961 - RNA, 21 nt, Artificial Sequence
  LDLR targeting guide sequence portion
uucuaugcaaaugccuccaag

SEQ ID NO: 6962 - RNA, 21 nt, Artificial Sequence
  LDLR targeting guide sequence portion
uucuaugcaagccuugcuaga

SEQ ID NO: 6963 - RNA, 21 nt, Artificial Sequence
  LDLR targeting guide sequence portion
uucucaguucagaguuguaca

SEQ ID NO: 6964 - RNA, 21 nt, Artificial Sequence
  LDLR targeting guide sequence portion
uucucccaaaaagcguugcac

SEQ ID NO: 6965 - RNA, 21 nt, Artificial Sequence
  LDLR targeting guide sequence portion
uucucgauauucacgaucacg

SEQ ID NO: 6966 - RNA, 21 nt, Artificial Sequence
  LDLR targeting guide sequence portion
uucucggggcccuguguaggg

SEQ ID NO: 6967 - RNA, 21 nt, Artificial Sequence
  LDLR targeting guide sequence portion
uucucuccaccgugacacaau

SEQ ID NO: 6968 - RNA, 21 nt, Artificial Sequence
  LDLR targeting guide sequence portion
uucucuccaggaaguuuugag

SEQ ID NO: 6969 - RNA, 21 nt, Artificial Sequence
  LDLR targeting guide sequence portion
uucucugggccugacaucccc

SEQ ID NO: 6970 - RNA, 21 nt, Artificial Sequence
  LDLR targeting guide sequence portion
uucucugucuuugaauaaaac

SEQ ID NO: 6971 - RNA, 21 nt, Artificial Sequence
  LDLR targeting guide sequence portion
uucucuuauccuucacgagga

SEQ ID NO: 6972 - RNA, 21 nt, Artificial Sequence
  LDLR targeting guide sequence portion
uucugaaauagggucuucauc

SEQ ID NO: 6973 - RNA, 21 nt, Artificial Sequence
  LDLR targeting guide sequence portion
uucugaaaucgccguguuacu

SEQ ID NO: 6974 - RNA, 21 nt, Artificial Sequence
  LDLR targeting guide sequence portion
uucugccucccagaugaauaa

SEQ ID NO: 6975 - RNA, 21 nt, Artificial Sequence
  LDLR targeting guide sequence portion
uucugggagaugggugucacu

SEQ ID NO: 6976 - RNA, 21 nt, Artificial Sequence
  LDLR targeting guide sequence portion
uucugggcagggacgggacuc

SEQ ID NO: 6977 - RNA, 21 nt, Artificial Sequence
  LDLR targeting guide sequence portion
uucugguuucggagcacguaa

SEQ ID NO: 6978 - RNA, 21 nt, Artificial Sequence
  LDLR targeting guide sequence portion
uucugucguguguguugggau

SEQ ID NO: 6979 - RNA, 21 nt, Artificial Sequence
  LDLR targeting guide sequence portion
uucuuccuuuccucgugaagg

SEQ ID NO: 6980 - RNA, 21 nt, Artificial Sequence
  LDLR targeting guide sequence portion
uucuuucugaaaucgccgugu

SEQ ID NO: 6981 - RNA, 21 nt, Artificial Sequence
  LDLR targeting guide sequence portion
uugaaagccacuugcuucucu

SEQ ID NO: 6982 - RNA, 21 nt, Artificial Sequence
  LDLR targeting guide sequence portion
uugaagucccggucaaccugc

SEQ ID NO: 6983 - RNA, 21 nt, Artificial Sequence
  LDLR targeting guide sequence portion
uugaauaaaacaaggccggcg

SEQ ID NO: 6984 - RNA, 21 nt, Artificial Sequence
  LDLR targeting guide sequence portion
uugacacgggcuuucccuggc

SEQ ID NO: 6985 - RNA, 21 nt, Artificial Sequence
  LDLR targeting guide sequence portion
uugaccgggacuucaaagccg

SEQ ID NO: 6986 - RNA, 21 nt, Artificial Sequence
  LDLR targeting guide sequence portion
uugacgggacuucagguucuu

SEQ ID NO: 6987 - RNA, 21 nt, Artificial Sequence
  LDLR targeting guide sequence portion
uugacuccugaguuuaggggu

SEQ ID NO: 6988 - RNA, 21 nt, Artificial Sequence
  LDLR targeting guide sequence portion
uugagcucaggcauuugaggc

SEQ ID NO: 6989 - RNA, 21 nt, Artificial Sequence
  LDLR targeting guide sequence portion
uugaggauugugucacggugg

SEQ ID NO: 6990 - RNA, 21 nt, Artificial Sequence
  LDLR targeting guide sequence portion
uugaggcugucgugagcuaug

SEQ ID NO: 6991 - RNA, 21 nt, Artificial Sequence
  LDLR targeting guide sequence portion
uugaguucaggaguuggagac

SEQ ID NO: 6992 - RNA, 21 nt, Artificial Sequence
  LDLR targeting guide sequence portion
uugaguuucucuccaccguga

SEQ ID NO: 6993 - RNA, 21 nt, Artificial Sequence
  LDLR targeting guide sequence portion
uugaucacaguaagacauuca

SEQ ID NO: 6994 - RNA, 21 nt, Artificial Sequence
  LDLR targeting guide sequence portion
uugauggguauguguuuaaaa

SEQ ID NO: 6995 - RNA, 21 nt, Artificial Sequence
  LDLR targeting guide sequence portion
uugcaaacccugguugcugua

SEQ ID NO: 6996 - RNA, 21 nt, Artificial Sequence
  LDLR targeting guide sequence portion
uugcacacaguccaguucgug

SEQ ID NO: 6997 - RNA, 21 nt, Artificial Sequence
  LDLR targeting guide sequence portion
uugcacgaacuggacugugug

SEQ ID NO: 6998 - RNA, 21 nt, Artificial Sequence
  LDLR targeting guide sequence portion
uugcacugauguccggagaga

SEQ ID NO: 6999 - RNA, 21 nt, Artificial Sequence
  LDLR targeting guide sequence portion
uugcacuguuuucugucgugu

SEQ ID NO: 7000 - RNA, 21 nt, Artificial Sequence
  LDLR targeting guide sequence portion
uugcacuuucucaguucagag

SEQ ID NO: 7001 - RNA, 21 nt, Artificial Sequence
  LDLR targeting guide sequence portion
uugcacuuuguauauugguug

SEQ ID NO: 7002 - RNA, 21 nt, Artificial Sequence
  LDLR targeting guide sequence portion
uugcauagaagagguaaacac

SEQ ID NO: 7003 - RNA, 21 nt, Artificial Sequence
  LDLR targeting guide sequence portion
uugcauagaaguggaagcacu

SEQ ID NO: 7004 - RNA, 21 nt, Artificial Sequence
  LDLR targeting guide sequence portion
uugcaugggcacuguccgaag

SEQ ID NO: 7005 - RNA, 21 nt, Artificial Sequence
  LDLR targeting guide sequence portion
uugccaaucccuugugacauc

SEQ ID NO: 7006 - RNA, 21 nt, Artificial Sequence
  LDLR targeting guide sequence portion
uugcccaggcuggaaagcagu

SEQ ID NO: 7007 - RNA, 21 nt, Artificial Sequence
  LDLR targeting guide sequence portion
uugcccugucacccccgaauc

SEQ ID NO: 7008 - RNA, 21 nt, Artificial Sequence
  LDLR targeting guide sequence portion
uugccucugaaaugccucuuc

SEQ ID NO: 7009 - RNA, 21 nt, Artificial Sequence
  LDLR targeting guide sequence portion
uugccugccagagcuuuguuu

SEQ ID NO: 7010 - RNA, 21 nt, Artificial Sequence
  LDLR targeting guide sequence portion
uugcuagacagccagguuagc

SEQ ID NO: 7011 - RNA, 21 nt, Artificial Sequence
  LDLR targeting guide sequence portion
uugcucaggccuggucuccaa

SEQ ID NO: 7012 - RNA, 21 nt, Artificial Sequence
  LDLR targeting guide sequence portion
uugcuguauuuguucagugac

SEQ ID NO: 7013 - RNA, 21 nt, Artificial Sequence
  LDLR targeting guide sequence portion
uugcuucucugggccugacau

SEQ ID NO: 7014 - RNA, 21 nt, Artificial Sequence
  LDLR targeting guide sequence portion
uuggagaccaggccugagcaa

SEQ ID NO: 7015 - RNA, 21 nt, Artificial Sequence
  LDLR targeting guide sequence portion
uuggaggcauuugcauagaag

SEQ ID NO: 7016 - RNA, 21 nt, Artificial Sequence
  LDLR targeting guide sequence portion
uuggcaauuguccccagggac

SEQ ID NO: 7017 - RNA, 21 nt, Artificial Sequence
  LDLR targeting guide sequence portion
uuggccagacacaggugccuc

SEQ ID NO: 7018 - RNA, 21 nt, Artificial Sequence
  LDLR targeting guide sequence portion
uuggccgugaggacacguggc

SEQ ID NO: 7019 - RNA, 21 nt, Artificial Sequence
  LDLR targeting guide sequence portion
uuggcuuagagauugguggau

SEQ ID NO: 7020 - RNA, 21 nt, Artificial Sequence
  LDLR targeting guide sequence portion
uugggagaaugauguccccgu

SEQ ID NO: 7021 - RNA, 21 nt, Artificial Sequence
  LDLR targeting guide sequence portion
uugggaggcugagcuggauca

SEQ ID NO: 7022 - RNA, 21 nt, Artificial Sequence
  LDLR targeting guide sequence portion
uugggaugggaucccaggcca

SEQ ID NO: 7023 - RNA, 21 nt, Artificial Sequence
  LDLR targeting guide sequence portion
uugggauuuugguuucuuccu

SEQ ID NO: 7024 - RNA, 21 nt, Artificial Sequence
  LDLR targeting guide sequence portion
uuggggaagugaauggcuugg

SEQ ID NO: 7025 - RNA, 21 nt, Artificial Sequence
  LDLR targeting guide sequence portion
uuggguugggauuuugguuuc

SEQ ID NO: 7026 - RNA, 21 nt, Artificial Sequence
  LDLR targeting guide sequence portion
uuggucucggugccaccacgg

SEQ ID NO: 7027 - RNA, 21 nt, Artificial Sequence
  LDLR targeting guide sequence portion
uuggucuucucugucuuugaa

SEQ ID NO: 7028 - RNA, 21 nt, Artificial Sequence
  LDLR targeting guide sequence portion
uuggugaaugaguuuggucuc

SEQ ID NO: 7029 - RNA, 21 nt, Artificial Sequence
  LDLR targeting guide sequence portion
uuggugccaucugcuguugug

SEQ ID NO: 7030 - RNA, 21 nt, Artificial Sequence
  LDLR targeting guide sequence portion
uugguggaugaggcagggcca

SEQ ID NO: 7031 - RNA, 21 nt, Artificial Sequence
  LDLR targeting guide sequence portion
uugguuucuuccuuuccucgu

SEQ ID NO: 7032 - RNA, 21 nt, Artificial Sequence
  LDLR targeting guide sequence portion
uugguuuuuguagagauggga

SEQ ID NO: 7033 - RNA, 21 nt, Artificial Sequence
  LDLR targeting guide sequence portion
uuguacacuguguacauuugg

SEQ ID NO: 7034 - RNA, 21 nt, Artificial Sequence
  LDLR targeting guide sequence portion
uuguacauaaagaagaggcau

SEQ ID NO: 7035 - RNA, 21 nt, Artificial Sequence
  LDLR targeting guide sequence portion
uuguaccuuccuuaagccagg

SEQ ID NO: 7036 - RNA, 21 nt, Artificial Sequence
  LDLR targeting guide sequence portion
uuguagccugaaugucuuacu

SEQ ID NO: 7037 - RNA, 21 nt, Artificial Sequence
  LDLR targeting guide sequence portion
uuguauguaugaguggcuucu

SEQ ID NO: 7038 - RNA, 21 nt, Artificial Sequence
  LDLR targeting guide sequence portion
uuguauuucugaaauaggguc

SEQ ID NO: 7039 - RNA, 21 nt, Artificial Sequence
  LDLR targeting guide sequence portion
uuguccccagggacaaaacac

SEQ ID NO: 7040 - RNA, 21 nt, Artificial Sequence
  LDLR targeting guide sequence portion
uugucccuggggacaauugcc

SEQ ID NO: 7041 - RNA, 21 nt, Artificial Sequence
  LDLR targeting guide sequence portion
uugucgucuuuauguccgccc

SEQ ID NO: 7042 - RNA, 21 nt, Artificial Sequence
  LDLR targeting guide sequence portion
uugucguugauggguaugugu

SEQ ID NO: 7043 - RNA, 21 nt, Artificial Sequence
  LDLR targeting guide sequence portion
uugugacaucuucacgcggga

SEQ ID NO: 7044 - RNA, 21 nt, Artificial Sequence
  LDLR targeting guide sequence portion
uugugucacgguggagagaaa

SEQ ID NO: 7045 - RNA, 21 nt, Artificial Sequence
  LDLR targeting guide sequence portion
uuguguguugaaagccacuug

SEQ ID NO: 7046 - RNA, 21 nt, Artificial Sequence
  LDLR targeting guide sequence portion
uuguucagugacuauucucgg

SEQ ID NO: 7047 - RNA, 21 nt, Artificial Sequence
  LDLR targeting guide sequence portion
uuguugcucaggccuggucuc

SEQ ID NO: 7048 - RNA, 21 nt, Artificial Sequence
  LDLR targeting guide sequence portion
uuguuuuauucaaagacagag

SEQ ID NO: 7049 - RNA, 21 nt, Artificial Sequence
  LDLR targeting guide sequence portion
uuuaaaaagugacacccaucu

SEQ ID NO: 7050 - RNA, 21 nt, Artificial Sequence
  LDLR targeting guide sequence portion
uuuaaaacaugcacggugagg

SEQ ID NO: 7051 - RNA, 21 nt, Artificial Sequence
  LDLR targeting guide sequence portion
uuuaaacacauacccaucaac

SEQ ID NO: 7052 - RNA, 21 nt, Artificial Sequence
  LDLR targeting guide sequence portion
uuuaccucuucuaugcaagcc

SEQ ID NO: 7053 - RNA, 21 nt, Artificial Sequence
  LDLR targeting guide sequence portion
uuuacgugcuccgaaaccaga

SEQ ID NO: 7054 - RNA, 21 nt, Artificial Sequence
  LDLR targeting guide sequence portion
uuuagggguuuggcuuagaga

SEQ ID NO: 7055 - RNA, 21 nt, Artificial Sequence
  LDLR targeting guide sequence portion
uuuauguccgcccaccuagug

SEQ ID NO: 7056 - RNA, 21 nt, Artificial Sequence
  LDLR targeting guide sequence portion
uuuauuaagugccugagacac

SEQ ID NO: 7057 - RNA, 21 nt, Artificial Sequence
  LDLR targeting guide sequence portion
uuuauucaaagacagagaaga

SEQ ID NO: 7058 - RNA, 21 nt, Artificial Sequence
  LDLR targeting guide sequence portion
uuuauucaucugggaggcaga

SEQ ID NO: 7059 - RNA, 21 nt, Artificial Sequence
  LDLR targeting guide sequence portion
uuuauuuuugcaaacccuggu

SEQ ID NO: 7060 - RNA, 21 nt, Artificial Sequence
  LDLR targeting guide sequence portion
uuucaacacacaacagcagau

SEQ ID NO: 7061 - RNA, 21 nt, Artificial Sequence
  LDLR targeting guide sequence portion
uuucagaaagaaccugaaguc

SEQ ID NO: 7062 - RNA, 21 nt, Artificial Sequence
  LDLR targeting guide sequence portion
uuucagaggcaauaacccccu

SEQ ID NO: 7063 - RNA, 21 nt, Artificial Sequence
  LDLR targeting guide sequence portion
uuucaucuuccauguuugagg

SEQ ID NO: 7064 - RNA, 21 nt, Artificial Sequence
  LDLR targeting guide sequence portion
uuucccuggccugggauccca

SEQ ID NO: 7065 - RNA, 21 nt, Artificial Sequence
  LDLR targeting guide sequence portion
uuuccgacgccaugaaucccu

SEQ ID NO: 7066 - RNA, 21 nt, Artificial Sequence
  LDLR targeting guide sequence portion
uuuccucgugaaggauaagag

SEQ ID NO: 7067 - RNA, 21 nt, Artificial Sequence
  LDLR targeting guide sequence portion
uuuccuggcuuaaggaaggua

SEQ ID NO: 7068 - RNA, 21 nt, Artificial Sequence
  LDLR targeting guide sequence portion
uuucgagguggguuuguaccu

SEQ ID NO: 7069 - RNA, 21 nt, Artificial Sequence
  LDLR targeting guide sequence portion
uuucggagcacguaaaugcgu

SEQ ID NO: 7070 - RNA, 21 nt, Artificial Sequence
  LDLR targeting guide sequence portion
uuucucaguucagaguuguac

SEQ ID NO: 7071 - RNA, 21 nt, Artificial Sequence
  LDLR targeting guide sequence portion
uuucucuccaccgugacacaa

SEQ ID NO: 7072 - RNA, 21 nt, Artificial Sequence
  LDLR targeting guide sequence portion
uuucucuccaggaaguuuuga

SEQ ID NO: 7073 - RNA, 21 nt, Artificial Sequence
  LDLR targeting guide sequence portion
uuucucuuauccuucacgagg

SEQ ID NO: 7074 - RNA, 21 nt, Artificial Sequence
  LDLR targeting guide sequence portion
uuucugaaauagggucuucau

SEQ ID NO: 7075 - RNA, 21 nt, Artificial Sequence
  LDLR targeting guide sequence portion
uuucugaaaucgccguguuac

SEQ ID NO: 7076 - RNA, 21 nt, Artificial Sequence
  LDLR targeting guide sequence portion
uuucugguuucggagcacgua

SEQ ID NO: 7077 - RNA, 21 nt, Artificial Sequence
  LDLR targeting guide sequence portion
uuucugucguguguguuggga

SEQ ID NO: 7078 - RNA, 21 nt, Artificial Sequence
  LDLR targeting guide sequence portion
uuucuuccuuuccucgugaag

SEQ ID NO: 7079 - RNA, 21 nt, Artificial Sequence
  LDLR targeting guide sequence portion
uuugaagucccggucaaccug

SEQ ID NO: 7080 - RNA, 21 nt, Artificial Sequence
  LDLR targeting guide sequence portion
uuugaauaaaacaaggccggc

SEQ ID NO: 7081 - RNA, 21 nt, Artificial Sequence
  LDLR targeting guide sequence portion
uuugacgggacuucagguucu

SEQ ID NO: 7082 - RNA, 21 nt, Artificial Sequence
  LDLR targeting guide sequence portion
uuugagcucaggcauuugagg

SEQ ID NO: 7083 - RNA, 21 nt, Artificial Sequence
  LDLR targeting guide sequence portion
uuugaggauugugucacggug

SEQ ID NO: 7084 - RNA, 21 nt, Artificial Sequence
  LDLR targeting guide sequence portion
uuugaggcugucgugagcuau

SEQ ID NO: 7085 - RNA, 21 nt, Artificial Sequence
  LDLR targeting guide sequence portion
uuugaguuucucuccaccgug

SEQ ID NO: 7086 - RNA, 21 nt, Artificial Sequence
  LDLR targeting guide sequence portion
uuugcaaacccugguugcugu

SEQ ID NO: 7087 - RNA, 21 nt, Artificial Sequence
  LDLR targeting guide sequence portion
uuugcacgaacuggacugugu

SEQ ID NO: 7088 - RNA, 21 nt, Artificial Sequence
  LDLR targeting guide sequence portion
uuugcacuguuuucugucgug

SEQ ID NO: 7089 - RNA, 21 nt, Artificial Sequence
  LDLR targeting guide sequence portion
uuugcauagaaguggaagcac

SEQ ID NO: 7090 - RNA, 21 nt, Artificial Sequence
  LDLR targeting guide sequence portion
uuugcccugucacccccgaau

SEQ ID NO: 7091 - RNA, 21 nt, Artificial Sequence
  LDLR targeting guide sequence portion
uuuggccagacacaggugccu

SEQ ID NO: 7092 - RNA, 21 nt, Artificial Sequence
  LDLR targeting guide sequence portion
uuuggcuuagagauuggugga

SEQ ID NO: 7093 - RNA, 21 nt, Artificial Sequence
  LDLR targeting guide sequence portion
uuugggagaaugauguccccg

SEQ ID NO: 7094 - RNA, 21 nt, Artificial Sequence
  LDLR targeting guide sequence portion
uuugggaggcugagcuggauc

SEQ ID NO: 7095 - RNA, 21 nt, Artificial Sequence
  LDLR targeting guide sequence portion
uuuggucucggugccaccacg

SEQ ID NO: 7096 - RNA, 21 nt, Artificial Sequence
  LDLR targeting guide sequence portion
uuuggugaaugaguuuggucu

SEQ ID NO: 7097 - RNA, 21 nt, Artificial Sequence
  LDLR targeting guide sequence portion
uuugguuucuuccuuuccucg

SEQ ID NO: 7098 - RNA, 21 nt, Artificial Sequence
  LDLR targeting guide sequence portion
uuugguuuuuguagagauggg

SEQ ID NO: 7099 - RNA, 21 nt, Artificial Sequence
  LDLR targeting guide sequence portion
uuuguacauaaagaagaggca

SEQ ID NO: 7100 - RNA, 21 nt, Artificial Sequence
  LDLR targeting guide sequence portion
uuuguaccuuccuuaagccag

SEQ ID NO: 7101 - RNA, 21 nt, Artificial Sequence
  LDLR targeting guide sequence portion
uuuguagccugaaugucuuac

SEQ ID NO: 7102 - RNA, 21 nt, Artificial Sequence
  LDLR targeting guide sequence portion
uuugucccuggggacaauugc

SEQ ID NO: 7103 - RNA, 21 nt, Artificial Sequence
  LDLR targeting guide sequence portion
uuuguucagugacuauucucg

SEQ ID NO: 7104 - RNA, 21 nt, Artificial Sequence
  LDLR targeting guide sequence portion
uuuguugcucaggccuggucu

SEQ ID NO: 7105 - RNA, 21 nt, Artificial Sequence
  LDLR targeting guide sequence portion
uuuuaaacacauacccaucaa

SEQ ID NO: 7106 - RNA, 21 nt, Artificial Sequence
  LDLR targeting guide sequence portion
uuuucugucguguguguuggg

SEQ ID NO: 7107 - RNA, 21 nt, Artificial Sequence
  LDLR targeting guide sequence portion
uuuugaguuucucuccaccgu

SEQ ID NO: 7108 - RNA, 21 nt, Artificial Sequence
  LDLR targeting guide sequence portion
uuuugcaaacccugguugcug

SEQ ID NO: 7109 - RNA, 21 nt, Artificial Sequence
  LDLR targeting guide sequence portion
uuuugcacuguuuucugucgu

SEQ ID NO: 7110 - RNA, 21 nt, Artificial Sequence
  LDLR targeting guide sequence portion
uuuugggagaaugaugucccc

SEQ ID NO: 7111 - RNA, 21 nt, Artificial Sequence
  LDLR targeting guide sequence portion
uuuugguuucuuccuuuccuc

SEQ ID NO: 7112 - RNA, 21 nt, Artificial Sequence
  LDLR targeting guide sequence portion
uuuugguuuuuguagagaugg

SEQ ID NO: 7113 - RNA, 21 nt, Artificial Sequence
  LDLR targeting guide sequence portion
uuuuguagccugaaugucuua

SEQ ID NO: 7114 - RNA, 21 nt, Artificial Sequence
  LDLR targeting guide sequence portion
uuuugucccuggggacaauug

SEQ ID NO: 7115 - RNA, 21 nt, Artificial Sequence
  LDLR targeting guide sequence portion
uuuuugcaaacccugguugcu

SEQ ID NO: 7116 - RNA, 21 nt, Artificial Sequence
  LDLR targeting guide sequence portion
uuuuugggagaaugauguccc

SEQ ID NO: 7117 - RNA, 21 nt, Artificial Sequence
  LDLR targeting guide sequence portion
uuuuugguuuuuguagagaug

SEQ ID NO: 7118 - RNA, 21 nt, Artificial Sequence
  LDLR targeting guide sequence portion
uuuuuguagccugaaugucuu

SEQ ID NO: 7119 - RNA, 22 nt, Artificial Sequence
  LDLR targeting guide sequence portion
aaaaaaccaugcauggugcauc

SEQ ID NO: 7120 - RNA, 22 nt, Artificial Sequence
  LDLR targeting guide sequence portion
aaaaaauccccacuaucuguac

SEQ ID NO: 7121 - RNA, 22 nt, Artificial Sequence
  LDLR targeting guide sequence portion
aaaaaaugaauuuggccagaca

SEQ ID NO: 7122 - RNA, 22 nt, Artificial Sequence
  LDLR targeting guide sequence portion
aaaaaccaugcauggugcauca

SEQ ID NO: 7123 - RNA, 22 nt, Artificial Sequence
  LDLR targeting guide sequence portion
aaaaagcguugcacacagucca

SEQ ID NO: 7124 - RNA, 22 nt, Artificial Sequence
  LDLR targeting guide sequence portion
aaaaagugacacccaucuccca

SEQ ID NO: 7125 - RNA, 22 nt, Artificial Sequence
  LDLR targeting guide sequence portion
aaaaaguuaaaaaucagcuggg

SEQ ID NO: 7126 - RNA, 22 nt, Artificial Sequence
  LDLR targeting guide sequence portion
aaaaaucagcuggguacggugg

SEQ ID NO: 7127 - RNA, 22 nt, Artificial Sequence
  LDLR targeting guide sequence portion
aaaaauccccacuaucuguaca

SEQ ID NO: 7128 - RNA, 22 nt, Artificial Sequence
  LDLR targeting guide sequence portion
aaaaaugaauuuggccagacac

SEQ ID NO: 7129 - RNA, 22 nt, Artificial Sequence
  LDLR targeting guide sequence portion
aaaacaaagcucuggcaggcaa

SEQ ID NO: 7130 - RNA, 22 nt, Artificial Sequence
  LDLR targeting guide sequence portion
aaaacaaggccggcgaggucuc

SEQ ID NO: 7131 - RNA, 22 nt, Artificial Sequence
  LDLR targeting guide sequence portion
aaaacaugcacggugaggccgg

SEQ ID NO: 7132 - RNA, 22 nt, Artificial Sequence
  LDLR targeting guide sequence portion
aaaaccaaaaaguuaaaaauca

SEQ ID NO: 7133 - RNA, 22 nt, Artificial Sequence
  LDLR targeting guide sequence portion
aaaaccaugcauggugcaucag

SEQ ID NO: 7134 - RNA, 22 nt, Artificial Sequence
  LDLR targeting guide sequence portion
aaaacuuccuggagagaaaugg

SEQ ID NO: 7135 - RNA, 22 nt, Artificial Sequence
  LDLR targeting guide sequence portion
aaaagcguugcacacaguccag

SEQ ID NO: 7136 - RNA, 22 nt, Artificial Sequence
  LDLR targeting guide sequence portion
aaaagugacacccaucucccag

SEQ ID NO: 7137 - RNA, 22 nt, Artificial Sequence
  LDLR targeting guide sequence portion
aaaaguuaaaaaucagcugggu

SEQ ID NO: 7138 - RNA, 22 nt, Artificial Sequence
  LDLR targeting guide sequence portion
aaaauaaauaaauccuccaguc

SEQ ID NO: 7139 - RNA, 22 nt, Artificial Sequence
  LDLR targeting guide sequence portion
aaaaucagcuggguacgguggc

SEQ ID NO: 7140 - RNA, 22 nt, Artificial Sequence
  LDLR targeting guide sequence portion
aaaaucccaacccaagccauug

SEQ ID NO: 7141 - RNA, 22 nt, Artificial Sequence
  LDLR targeting guide sequence portion
aaaauccccacuaucuguacag

SEQ ID NO: 7142 - RNA, 22 nt, Artificial Sequence
  LDLR targeting guide sequence portion
aaaaugaauuuggccagacaca

SEQ ID NO: 7143 - RNA, 22 nt, Artificial Sequence
  LDLR targeting guide sequence portion
aaacaaagcucuggcaggcaau

SEQ ID NO: 7144 - RNA, 22 nt, Artificial Sequence
  LDLR targeting guide sequence portion
aaacaaggccggcgaggucuca

SEQ ID NO: 7145 - RNA, 22 nt, Artificial Sequence
  LDLR targeting guide sequence portion
aaacacauacccaucaacgaca

SEQ ID NO: 7146 - RNA, 22 nt, Artificial Sequence
  LDLR targeting guide sequence portion
aaacacguugacuccugaguuu

SEQ ID NO: 7147 - RNA, 22 nt, Artificial Sequence
  LDLR targeting guide sequence portion
aaacaggcccggggggaccagg

SEQ ID NO: 7148 - RNA, 22 nt, Artificial Sequence
  LDLR targeting guide sequence portion
aaacauaacaaaaaauccccac

SEQ ID NO: 7149 - RNA, 22 nt, Artificial Sequence
  LDLR targeting guide sequence portion
aaacaugcacggugaggccggg

SEQ ID NO: 7150 - RNA, 22 nt, Artificial Sequence
  LDLR targeting guide sequence portion
aaacauggaagaugaaagggga

SEQ ID NO: 7151 - RNA, 22 nt, Artificial Sequence
  LDLR targeting guide sequence portion
aaaccaaaaaguuaaaaaucag

SEQ ID NO: 7152 - RNA, 22 nt, Artificial Sequence
  LDLR targeting guide sequence portion
aaaccaaaaucccaacccaagc

SEQ ID NO: 7153 - RNA, 22 nt, Artificial Sequence
  LDLR targeting guide sequence portion
aaaccacuguauagaagguuuu

SEQ ID NO: 7154 - RNA, 22 nt, Artificial Sequence
  LDLR targeting guide sequence portion
aaaccagaaaggcuuaucacgg

SEQ ID NO: 7155 - RNA, 22 nt, Artificial Sequence
  LDLR targeting guide sequence portion
aaaccauccucccaccucagcc

SEQ ID NO: 7156 - RNA, 22 nt, Artificial Sequence
  LDLR targeting guide sequence portion
aaaccaugcauggugcaucagc

SEQ ID NO: 7157 - RNA, 22 nt, Artificial Sequence
  LDLR targeting guide sequence portion
aaacccaccucgaaagacacug

SEQ ID NO: 7158 - RNA, 22 nt, Artificial Sequence
  LDLR targeting guide sequence portion
aaaccccuaaacucaggaguca

SEQ ID NO: 7159 - RNA, 22 nt, Artificial Sequence
  LDLR targeting guide sequence portion
aaacccugguugcuguauuugu

SEQ ID NO: 7160 - RNA, 22 nt, Artificial Sequence
  LDLR targeting guide sequence portion
aaacgauccagacuggaggauu

SEQ ID NO: 7161 - RNA, 22 nt, Artificial Sequence
  LDLR targeting guide sequence portion
aaacucaaaacuuccuggagag

SEQ ID NO: 7162 - RNA, 22 nt, Artificial Sequence
  LDLR targeting guide sequence portion
aaacucaggagucaacguguuu

SEQ ID NO: 7163 - RNA, 22 nt, Artificial Sequence
  LDLR targeting guide sequence portion
aaacucauucaccaaaugaugc

SEQ ID NO: 7164 - RNA, 22 nt, Artificial Sequence
  LDLR targeting guide sequence portion
aaacuuccuggagagaaaugga

SEQ ID NO: 7165 - RNA, 22 nt, Artificial Sequence
  LDLR targeting guide sequence portion
aaagaaccugaagucccgucaa

SEQ ID NO: 7166 - RNA, 22 nt, Artificial Sequence
  LDLR targeting guide sequence portion
aaagaagaggcauuucagaggc

SEQ ID NO: 7167 - RNA, 22 nt, Artificial Sequence
  LDLR targeting guide sequence portion
aaagacacugggugggucauga

SEQ ID NO: 7168 - RNA, 22 nt, Artificial Sequence
  LDLR targeting guide sequence portion
aaagacagagaagaccaaagca

SEQ ID NO: 7169 - RNA, 22 nt, Artificial Sequence
  LDLR targeting guide sequence portion
aaagacgacaauggcaguucuc

SEQ ID NO: 7170 - RNA, 22 nt, Artificial Sequence
  LDLR targeting guide sequence portion
aaagauuauuugcacgaacugg

SEQ ID NO: 7171 - RNA, 22 nt, Artificial Sequence
  LDLR targeting guide sequence portion
aaagcaguggcauaaucauagc

SEQ ID NO: 7172 - RNA, 22 nt, Artificial Sequence
  LDLR targeting guide sequence portion
aaagcauugccugccagagcuu

SEQ ID NO: 7173 - RNA, 22 nt, Artificial Sequence
  LDLR targeting guide sequence portion
aaagccacuugcuucucugggc

SEQ ID NO: 7174 - RNA, 22 nt, Artificial Sequence
  LDLR targeting guide sequence portion
aaagcccgugucaaugaaugcc

SEQ ID NO: 7175 - RNA, 22 nt, Artificial Sequence
  LDLR targeting guide sequence portion
aaagccgugaucgugaauaucg

SEQ ID NO: 7176 - RNA, 22 nt, Artificial Sequence
  LDLR targeting guide sequence portion
aaagcgagaucccaucucuaca

SEQ ID NO: 7177 - RNA, 22 nt, Artificial Sequence
  LDLR targeting guide sequence portion
aaagcguugcacacaguccagu

SEQ ID NO: 7178 - RNA, 22 nt, Artificial Sequence
  LDLR targeting guide sequence portion
aaagcucuggcaggcaaugcuu

SEQ ID NO: 7179 - RNA, 22 nt, Artificial Sequence
  LDLR targeting guide sequence portion
aaaggaagaaaccaaaauccca

SEQ ID NO: 7180 - RNA, 22 nt, Artificial Sequence
  LDLR targeting guide sequence portion
aaaggcuaaccuggcugucuag

SEQ ID NO: 7181 - RNA, 22 nt, Artificial Sequence
  LDLR targeting guide sequence portion
aaaggcuuaucacgguucccug

SEQ ID NO: 7182 - RNA, 22 nt, Artificial Sequence
  LDLR targeting guide sequence portion
aaagggauucauggcgucggaa

SEQ ID NO: 7183 - RNA, 22 nt, Artificial Sequence
  LDLR targeting guide sequence portion
aaaggggaggggaugucaggcc

SEQ ID NO: 7184 - RNA, 22 nt, Artificial Sequence
  LDLR targeting guide sequence portion
aaagugacacccaucucccaga

SEQ ID NO: 7185 - RNA, 22 nt, Artificial Sequence
  LDLR targeting guide sequence portion
aaagugcaaacauaacaaaaaa

SEQ ID NO: 7186 - RNA, 22 nt, Artificial Sequence
  LDLR targeting guide sequence portion
aaagugcaaggagaccacggga

SEQ ID NO: 7187 - RNA, 22 nt, Artificial Sequence
  LDLR targeting guide sequence portion
aaaguuaaaaaucagcugggua

SEQ ID NO: 7188 - RNA, 22 nt, Artificial Sequence
  LDLR targeting guide sequence portion
aaauaaauaaauccuccagucu

SEQ ID NO: 7189 - RNA, 22 nt, Artificial Sequence
  LDLR targeting guide sequence portion
aaauaaauccuccagucuggau

SEQ ID NO: 7190 - RNA, 22 nt, Artificial Sequence
  LDLR targeting guide sequence portion
aaauacagcaaccaggguuugc

SEQ ID NO: 7191 - RNA, 22 nt, Artificial Sequence
  LDLR targeting guide sequence portion
aaauauauaaaacaaagcucug

SEQ ID NO: 7192 - RNA, 22 nt, Artificial Sequence
  LDLR targeting guide sequence portion
aaauauuaagggugaccaguga

SEQ ID NO: 7193 - RNA, 22 nt, Artificial Sequence
  LDLR targeting guide sequence portion
aaaucagcuggguacgguggca

SEQ ID NO: 7194 - RNA, 22 nt, Artificial Sequence
  LDLR targeting guide sequence portion
aaaucccaacccaagccauugc

SEQ ID NO: 7195 - RNA, 22 nt, Artificial Sequence
  LDLR targeting guide sequence portion
aaauccccacuaucuguacagg

SEQ ID NO: 7196 - RNA, 22 nt, Artificial Sequence
  LDLR targeting guide sequence portion
aaauccuccagucuggaucguu

SEQ ID NO: 7197 - RNA, 22 nt, Artificial Sequence
  LDLR targeting guide sequence portion
aaaucgccguguuacuguugca

SEQ ID NO: 7198 - RNA, 22 nt, Artificial Sequence
  LDLR targeting guide sequence portion
aaaugaauuuggccagacacag

SEQ ID NO: 7199 - RNA, 22 nt, Artificial Sequence
  LDLR targeting guide sequence portion
aaaugaucuggcugaauccgug

SEQ ID NO: 7200 - RNA, 22 nt, Artificial Sequence
  LDLR targeting guide sequence portion
aaaugaugccacuucccagagg

SEQ ID NO: 7201 - RNA, 22 nt, Artificial Sequence
  LDLR targeting guide sequence portion
aaaugccaaauguacacagugu

SEQ ID NO: 7202 - RNA, 22 nt, Artificial Sequence
  LDLR targeting guide sequence portion
aaaugccuccaagccauucacu

SEQ ID NO: 7203 - RNA, 22 nt, Artificial Sequence
  LDLR targeting guide sequence portion
aaaugccugagcucaaaccauc

SEQ ID NO: 7204 - RNA, 22 nt, Artificial Sequence
  LDLR targeting guide sequence portion
aaaugcgucccuguacagauag

SEQ ID NO: 7205 - RNA, 22 nt, Artificial Sequence
  LDLR targeting guide sequence portion
aaauggaggugucauccugguc

SEQ ID NO: 7206 - RNA, 22 nt, Artificial Sequence
  LDLR targeting guide sequence portion
aaauguacacaguguacaacuc

SEQ ID NO: 7207 - RNA, 22 nt, Artificial Sequence
  LDLR targeting guide sequence portion
aacaaaaaauccccacuaucug

SEQ ID NO: 7208 - RNA, 22 nt, Artificial Sequence
  LDLR targeting guide sequence portion
aacaaagcucuggcaggcaaug

SEQ ID NO: 7209 - RNA, 22 nt, Artificial Sequence
  LDLR targeting guide sequence portion
aacaaauacagcaaccaggguu

SEQ ID NO: 7210 - RNA, 22 nt, Artificial Sequence
  LDLR targeting guide sequence portion
aacaaggccggcgaggucucag

SEQ ID NO: 7211 - RNA, 22 nt, Artificial Sequence
  LDLR targeting guide sequence portion
aacacaaaugccaaauguacac

SEQ ID NO: 7212 - RNA, 22 nt, Artificial Sequence
  LDLR targeting guide sequence portion
aacacacaacagcagauggcac

SEQ ID NO: 7213 - RNA, 22 nt, Artificial Sequence
  LDLR targeting guide sequence portion
aacacacacgacagaaaacagu

SEQ ID NO: 7214 - RNA, 22 nt, Artificial Sequence
  LDLR targeting guide sequence portion
aacacauacccaucaacgacaa

SEQ ID NO: 7215 - RNA, 22 nt, Artificial Sequence
  LDLR targeting guide sequence portion
aacacggcgauuucagaaagaa

SEQ ID NO: 7216 - RNA, 22 nt, Artificial Sequence
  LDLR targeting guide sequence portion
aacacguugacuccugaguuua

SEQ ID NO: 7217 - RNA, 22 nt, Artificial Sequence
  LDLR targeting guide sequence portion
aacagaugaagacccuauuuca

SEQ ID NO: 7218 - RNA, 22 nt, Artificial Sequence
  LDLR targeting guide sequence portion
aacagcagauggcaccaacggg

SEQ ID NO: 7219 - RNA, 22 nt, Artificial Sequence
  LDLR targeting guide sequence portion
aacaggcccggggggaccagga

SEQ ID NO: 7220 - RNA, 22 nt, Artificial Sequence
  LDLR targeting guide sequence portion
aacaggcuucggacagugccca

SEQ ID NO: 7221 - RNA, 22 nt, Artificial Sequence
  LDLR targeting guide sequence portion
aacaguaacacggcgauuucag

SEQ ID NO: 7222 - RNA, 22 nt, Artificial Sequence
  LDLR targeting guide sequence portion
aacagugcaaaauaauaacaca

SEQ ID NO: 7223 - RNA, 22 nt, Artificial Sequence
  LDLR targeting guide sequence portion
aacaguuucaaccaauauacaa

SEQ ID NO: 7224 - RNA, 22 nt, Artificial Sequence
  LDLR targeting guide sequence portion
aacauaacaaaaaauccccacu

SEQ ID NO: 7225 - RNA, 22 nt, Artificial Sequence
  LDLR targeting guide sequence portion
aacaucugccuggagucccguc

SEQ ID NO: 7226 - RNA, 22 nt, Artificial Sequence
  LDLR targeting guide sequence portion
aacaugcacggugaggccgggc

SEQ ID NO: 7227 - RNA, 22 nt, Artificial Sequence
  LDLR targeting guide sequence portion
aacauggaagaugaaaggggag

SEQ ID NO: 7228 - RNA, 22 nt, Artificial Sequence
  LDLR targeting guide sequence portion
aaccaaaaaguuaaaaaucagc

SEQ ID NO: 7229 - RNA, 22 nt, Artificial Sequence
  LDLR targeting guide sequence portion
aaccaaaaucccaacccaagcc

SEQ ID NO: 7230 - RNA, 22 nt, Artificial Sequence
  LDLR targeting guide sequence portion
aaccacuguauagaagguuuuu

SEQ ID NO: 7231 - RNA, 22 nt, Artificial Sequence
  LDLR targeting guide sequence portion
aaccagaaaggcuuaucacggu

SEQ ID NO: 7232 - RNA, 22 nt, Artificial Sequence
  LDLR targeting guide sequence portion
aaccauccucccaccucagccu

SEQ ID NO: 7233 - RNA, 22 nt, Artificial Sequence
  LDLR targeting guide sequence portion
aaccaugcauggugcaucagca

SEQ ID NO: 7234 - RNA, 22 nt, Artificial Sequence
  LDLR targeting guide sequence portion
aacccaagccauugcaugggca

SEQ ID NO: 7235 - RNA, 22 nt, Artificial Sequence
  LDLR targeting guide sequence portion
aacccaccucgaaagacacugg

SEQ ID NO: 7236 - RNA, 22 nt, Artificial Sequence
  LDLR targeting guide sequence portion
aacccccuacacagggccccga

SEQ ID NO: 7237 - RNA, 22 nt, Artificial Sequence
  LDLR targeting guide sequence portion
aaccccuaaacucaggagucaa

SEQ ID NO: 7238 - RNA, 22 nt, Artificial Sequence
  LDLR targeting guide sequence portion
aacccugguugcuguauuuguu

SEQ ID NO: 7239 - RNA, 22 nt, Artificial Sequence
  LDLR targeting guide sequence portion
aacccuuccugagaccucgccg

SEQ ID NO: 7240 - RNA, 22 nt, Artificial Sequence
  LDLR targeting guide sequence portion
aaccgggugucucaggcacuua

SEQ ID NO: 7241 - RNA, 22 nt, Artificial Sequence
  LDLR targeting guide sequence portion
aaccgugauaagccuuucuggu

SEQ ID NO: 7242 - RNA, 22 nt, Artificial Sequence
  LDLR targeting guide sequence portion
aaccugaagucccgucaaacga

SEQ ID NO: 7243 - RNA, 22 nt, Artificial Sequence
  LDLR targeting guide sequence portion
aaccugccccucucuguccccg

SEQ ID NO: 7244 - RNA, 22 nt, Artificial Sequence
  LDLR targeting guide sequence portion
aaccuggcugucuagcaaggcu

SEQ ID NO: 7245 - RNA, 22 nt, Artificial Sequence
  LDLR targeting guide sequence portion
aaccuucuauacagugguuuaa

SEQ ID NO: 7246 - RNA, 22 nt, Artificial Sequence
  LDLR targeting guide sequence portion
aacgacaagauuggggaaguga

SEQ ID NO: 7247 - RNA, 22 nt, Artificial Sequence
  LDLR targeting guide sequence portion
aacgauccagacuggaggauuu

SEQ ID NO: 7248 - RNA, 22 nt, Artificial Sequence
  LDLR targeting guide sequence portion
aacgcuuuuugggagaaugaug

SEQ ID NO: 7249 - RNA, 22 nt, Artificial Sequence
  LDLR targeting guide sequence portion
aacgggacccccuggcccugcc

SEQ ID NO: 7250 - RNA, 22 nt, Artificial Sequence
  LDLR targeting guide sequence portion
aacggggacaucauucucccaa

SEQ ID NO: 7251 - RNA, 22 nt, Artificial Sequence
  LDLR targeting guide sequence portion
aacguguuuaccucuucuaugc

SEQ ID NO: 7252 - RNA, 22 nt, Artificial Sequence
  LDLR targeting guide sequence portion
aacucaaaacuuccuggagaga

SEQ ID NO: 7253 - RNA, 22 nt, Artificial Sequence
  LDLR targeting guide sequence portion
aacucaagugauccagcucagc

SEQ ID NO: 7254 - RNA, 22 nt, Artificial Sequence
  LDLR targeting guide sequence portion
aacucaggagucaacguguuua

SEQ ID NO: 7255 - RNA, 22 nt, Artificial Sequence
  LDLR targeting guide sequence portion
aacucauucaccaaaugaugcc

SEQ ID NO: 7256 - RNA, 22 nt, Artificial Sequence
  LDLR targeting guide sequence portion
aacucugaacugagaaagugca

SEQ ID NO: 7257 - RNA, 22 nt, Artificial Sequence
  LDLR targeting guide sequence portion
aacugagaaagugcaaggagac

SEQ ID NO: 7258 - RNA, 22 nt, Artificial Sequence
  LDLR targeting guide sequence portion
aacugccauugucgucuuuaug

SEQ ID NO: 7259 - RNA, 22 nt, Artificial Sequence
  LDLR targeting guide sequence portion
aacuggacugugugcaacgcuu

SEQ ID NO: 7260 - RNA, 22 nt, Artificial Sequence
  LDLR targeting guide sequence portion
aacuuccuggagagaaauggag

SEQ ID NO: 7261 - RNA, 22 nt, Artificial Sequence
  LDLR targeting guide sequence portion
aacuuuuugguuuuuguagaga

SEQ ID NO: 7262 - RNA, 22 nt, Artificial Sequence
  LDLR targeting guide sequence portion
aagaaaccaaaaucccaaccca

SEQ ID NO: 7263 - RNA, 22 nt, Artificial Sequence
  LDLR targeting guide sequence portion
aagaaccugaagucccgucaaa

SEQ ID NO: 7264 - RNA, 22 nt, Artificial Sequence
  LDLR targeting guide sequence portion
aagaagaggcauuucagaggca

SEQ ID NO: 7265 - RNA, 22 nt, Artificial Sequence
  LDLR targeting guide sequence portion
aagacacugggugggucaugau

SEQ ID NO: 7266 - RNA, 22 nt, Artificial Sequence
  LDLR targeting guide sequence portion
aagacagagaagaccaaagcau

SEQ ID NO: 7267 - RNA, 22 nt, Artificial Sequence
  LDLR targeting guide sequence portion
aagacauucaggcuacaaaaac

SEQ ID NO: 7268 - RNA, 22 nt, Artificial Sequence
  LDLR targeting guide sequence portion
aagaccaaagcauugccugcca

SEQ ID NO: 7269 - RNA, 22 nt, Artificial Sequence
  LDLR targeting guide sequence portion
aagacgacaauggcaguucucg

SEQ ID NO: 7270 - RNA, 22 nt, Artificial Sequence
  LDLR targeting guide sequence portion
aagagaaacaggcccgggggga

SEQ ID NO: 7271 - RNA, 22 nt, Artificial Sequence
  LDLR targeting guide sequence portion
aagaggcauuucagaggcaaua

SEQ ID NO: 7272 - RNA, 22 nt, Artificial Sequence
  LDLR targeting guide sequence portion
aagagguaaacacguugacucc

SEQ ID NO: 7273 - RNA, 22 nt, Artificial Sequence
  LDLR targeting guide sequence portion
aagaugaaaggggaggggaugu

SEQ ID NO: 7274 - RNA, 22 nt, Artificial Sequence
  LDLR targeting guide sequence portion
aagaugucacaagggauuggca

SEQ ID NO: 7275 - RNA, 22 nt, Artificial Sequence
  LDLR targeting guide sequence portion
aagauuauuugcacgaacugga

SEQ ID NO: 7276 - RNA, 22 nt, Artificial Sequence
  LDLR targeting guide sequence portion
aagauuggggaagugaauggcu

SEQ ID NO: 7277 - RNA, 22 nt, Artificial Sequence
  LDLR targeting guide sequence portion
aagcaaguggcuuucaacacac

SEQ ID NO: 7278 - RNA, 22 nt, Artificial Sequence
  LDLR targeting guide sequence portion
aagcacuaggugggcggacaua

SEQ ID NO: 7279 - RNA, 22 nt, Artificial Sequence
  LDLR targeting guide sequence portion
aagcaguggcauaaucauagcu

SEQ ID NO: 7280 - RNA, 22 nt, Artificial Sequence
  LDLR targeting guide sequence portion
aagcauugccugccagagcuuu

SEQ ID NO: 7281 - RNA, 22 nt, Artificial Sequence
  LDLR targeting guide sequence portion
aagccaaaccccuaaacucagg

SEQ ID NO: 7282 - RNA, 22 nt, Artificial Sequence
  LDLR targeting guide sequence portion
aagccacucauacauacaacgg

SEQ ID NO: 7283 - RNA, 22 nt, Artificial Sequence
  LDLR targeting guide sequence portion
aagccacuugcuucucugggcc

SEQ ID NO: 7284 - RNA, 22 nt, Artificial Sequence
  LDLR targeting guide sequence portion
aagccaggaaagggauucaugg

SEQ ID NO: 7285 - RNA, 22 nt, Artificial Sequence
  LDLR targeting guide sequence portion
aagccauucacuuccccaaucu

SEQ ID NO: 7286 - RNA, 22 nt, Artificial Sequence
  LDLR targeting guide sequence portion
aagccauugcaugggcacuguc

SEQ ID NO: 7287 - RNA, 22 nt, Artificial Sequence
  LDLR targeting guide sequence portion
aagcccgugucaaugaaugccg

SEQ ID NO: 7288 - RNA, 22 nt, Artificial Sequence
  LDLR targeting guide sequence portion
aagccgugaucgugaauaucga

SEQ ID NO: 7289 - RNA, 22 nt, Artificial Sequence
  LDLR targeting guide sequence portion
aagccuguucugccucccagau

SEQ ID NO: 7290 - RNA, 22 nt, Artificial Sequence
  LDLR targeting guide sequence portion
aagccuugcuagacagccaggu

SEQ ID NO: 7291 - RNA, 22 nt, Artificial Sequence
  LDLR targeting guide sequence portion
aagccuuucugguuucggagca

SEQ ID NO: 7292 - RNA, 22 nt, Artificial Sequence
  LDLR targeting guide sequence portion
aagcgagaucccaucucuacaa

SEQ ID NO: 7293 - RNA, 22 nt, Artificial Sequence
  LDLR targeting guide sequence portion
aagcguugcacacaguccaguu

SEQ ID NO: 7294 - RNA, 22 nt, Artificial Sequence
  LDLR targeting guide sequence portion
aagcucuggcaggcaaugcuuu

SEQ ID NO: 7295 - RNA, 22 nt, Artificial Sequence
  LDLR targeting guide sequence portion
aaggaagaaaccaaaaucccaa

SEQ ID NO: 7296 - RNA, 22 nt, Artificial Sequence
  LDLR targeting guide sequence portion
aaggaagguacaaacccaccuc

SEQ ID NO: 7297 - RNA, 22 nt, Artificial Sequence
  LDLR targeting guide sequence portion
aaggagaccacgggaauggaag

SEQ ID NO: 7298 - RNA, 22 nt, Artificial Sequence
  LDLR targeting guide sequence portion
aaggauaagagaaacaggcccg

SEQ ID NO: 7299 - RNA, 22 nt, Artificial Sequence
  LDLR targeting guide sequence portion
aaggccggcgaggucucaggaa

SEQ ID NO: 7300 - RNA, 22 nt, Artificial Sequence
  LDLR targeting guide sequence portion
aaggcuaaccuggcugucuagc

SEQ ID NO: 7301 - RNA, 22 nt, Artificial Sequence
  LDLR targeting guide sequence portion
aaggcuuaucacgguucccugc

SEQ ID NO: 7302 - RNA, 22 nt, Artificial Sequence
  LDLR targeting guide sequence portion
aaggcuugcauagaagagguaa

SEQ ID NO: 7303 - RNA, 22 nt, Artificial Sequence
  LDLR targeting guide sequence portion
aagggauucauggcgucggaaa

SEQ ID NO: 7304 - RNA, 22 nt, Artificial Sequence
  LDLR targeting guide sequence portion
aagggauuggcaauugucccca

SEQ ID NO: 7305 - RNA, 22 nt, Artificial Sequence
  LDLR targeting guide sequence portion
aaggggaggggaugucaggccc

SEQ ID NO: 7306 - RNA, 22 nt, Artificial Sequence
  LDLR targeting guide sequence portion
aagggugaccagugacucaggc

SEQ ID NO: 7307 - RNA, 22 nt, Artificial Sequence
  LDLR targeting guide sequence portion
aaggguucugggcagggacggg

SEQ ID NO: 7308 - RNA, 22 nt, Artificial Sequence
  LDLR targeting guide sequence portion
aagguaaccgggugucucaggc

SEQ ID NO: 7309 - RNA, 22 nt, Artificial Sequence
  LDLR targeting guide sequence portion
aagguacaaacccaccucgaaa

SEQ ID NO: 7310 - RNA, 22 nt, Artificial Sequence
  LDLR targeting guide sequence portion
aagguuuuuguagccugaaugu

SEQ ID NO: 7311 - RNA, 22 nt, Artificial Sequence
  LDLR targeting guide sequence portion
aagucccggucaaccugccccu

SEQ ID NO: 7312 - RNA, 22 nt, Artificial Sequence
  LDLR targeting guide sequence portion
aagucccgucaaacgauccaga

SEQ ID NO: 7313 - RNA, 22 nt, Artificial Sequence
  LDLR targeting guide sequence portion
aagugaauggcuuggaggcauu

SEQ ID NO: 7314 - RNA, 22 nt, Artificial Sequence
  LDLR targeting guide sequence portion
aagugacacccaucucccagaa

SEQ ID NO: 7315 - RNA, 22 nt, Artificial Sequence
  LDLR targeting guide sequence portion
aagugauccagcucagccuccc

SEQ ID NO: 7316 - RNA, 22 nt, Artificial Sequence
  LDLR targeting guide sequence portion
aagugcaaacauaacaaaaaau

SEQ ID NO: 7317 - RNA, 22 nt, Artificial Sequence
  LDLR targeting guide sequence portion
aagugcaaggagaccacgggaa

SEQ ID NO: 7318 - RNA, 22 nt, Artificial Sequence
  LDLR targeting guide sequence portion
aagugccugagacacccgguua

SEQ ID NO: 7319 - RNA, 22 nt, Artificial Sequence
  LDLR targeting guide sequence portion
aaguggaagcacuaggugggcg

SEQ ID NO: 7320 - RNA, 22 nt, Artificial Sequence
  LDLR targeting guide sequence portion
aaguggcaucauuuggugaaug

SEQ ID NO: 7321 - RNA, 22 nt, Artificial Sequence
  LDLR targeting guide sequence portion
aaguggcuuucaacacacaaca

SEQ ID NO: 7322 - RNA, 22 nt, Artificial Sequence
  LDLR targeting guide sequence portion
aaguggguaggggucgggagga

SEQ ID NO: 7323 - RNA, 22 nt, Artificial Sequence
  LDLR targeting guide sequence portion
aaguuaaaaaucagcuggguac

SEQ ID NO: 7324 - RNA, 22 nt, Artificial Sequence
  LDLR targeting guide sequence portion
aaguuuugaguuucucuccacc

SEQ ID NO: 7325 - RNA, 22 nt, Artificial Sequence
  LDLR targeting guide sequence portion
aauaaaacaaggccggcgaggu

SEQ ID NO: 7326 - RNA, 22 nt, Artificial Sequence
  LDLR targeting guide sequence portion
aauaaauaaauccuccagucug

SEQ ID NO: 7327 - RNA, 22 nt, Artificial Sequence
  LDLR targeting guide sequence portion
aauaaauauuaagggugaccag

SEQ ID NO: 7328 - RNA, 22 nt, Artificial Sequence
  LDLR targeting guide sequence portion
aauaaauccuccagucuggauc

SEQ ID NO: 7329 - RNA, 22 nt, Artificial Sequence
  LDLR targeting guide sequence portion
aauaacacaaaugccaaaugua

SEQ ID NO: 7330 - RNA, 22 nt, Artificial Sequence
  LDLR targeting guide sequence portion
aauaacccccuacacagggccc

SEQ ID NO: 7331 - RNA, 22 nt, Artificial Sequence
  LDLR targeting guide sequence portion
aauacagcaaccaggguuugca

SEQ ID NO: 7332 - RNA, 22 nt, Artificial Sequence
  LDLR targeting guide sequence portion
aauagucacugaacaaauacag

SEQ ID NO: 7333 - RNA, 22 nt, Artificial Sequence
  LDLR targeting guide sequence portion
aauauauaaaacaaagcucugg

SEQ ID NO: 7334 - RNA, 22 nt, Artificial Sequence
  LDLR targeting guide sequence portion
aauaucgagaacugccauuguc

SEQ ID NO: 7335 - RNA, 22 nt, Artificial Sequence
  LDLR targeting guide sequence portion
aauauuaagggugaccagugac

SEQ ID NO: 7336 - RNA, 22 nt, Artificial Sequence
  LDLR targeting guide sequence portion
aauauuuauuaagugccugaga

SEQ ID NO: 7337 - RNA, 22 nt, Artificial Sequence
  LDLR targeting guide sequence portion
aaucagcuggguacgguggcac

SEQ ID NO: 7338 - RNA, 22 nt, Artificial Sequence
  LDLR targeting guide sequence portion
aaucauagcucacgacagccuc

SEQ ID NO: 7339 - RNA, 22 nt, Artificial Sequence
  LDLR targeting guide sequence portion
aaucaugacccacccagugucu

SEQ ID NO: 7340 - RNA, 22 nt, Artificial Sequence
  LDLR targeting guide sequence portion
aaucccaacccaagccauugca

SEQ ID NO: 7341 - RNA, 22 nt, Artificial Sequence
  LDLR targeting guide sequence portion
aauccccacuaucuguacaggg

SEQ ID NO: 7342 - RNA, 22 nt, Artificial Sequence
  LDLR targeting guide sequence portion
aaucccuugugacaucuucacg

SEQ ID NO: 7343 - RNA, 22 nt, Artificial Sequence
  LDLR targeting guide sequence portion
aaucccuuuccuggcuuaagga

SEQ ID NO: 7344 - RNA, 22 nt, Artificial Sequence
  LDLR targeting guide sequence portion
aauccgugguggcaccgagacc

SEQ ID NO: 7345 - RNA, 22 nt, Artificial Sequence
  LDLR targeting guide sequence portion
aauccucaaacauggaagauga

SEQ ID NO: 7346 - RNA, 22 nt, Artificial Sequence
  LDLR targeting guide sequence portion
aauccuccagucuggaucguuu

SEQ ID NO: 7347 - RNA, 22 nt, Artificial Sequence
  LDLR targeting guide sequence portion
aaucgccguguuacuguugcac

SEQ ID NO: 7348 - RNA, 22 nt, Artificial Sequence
  LDLR targeting guide sequence portion
aaucucuaagccaaaccccuaa

SEQ ID NO: 7349 - RNA, 22 nt, Artificial Sequence
  LDLR targeting guide sequence portion
aaucuugucguugauggguaug

SEQ ID NO: 7350 - RNA, 22 nt, Artificial Sequence
  LDLR targeting guide sequence portion
aaugaaugccggggacagagag

SEQ ID NO: 7351 - RNA, 22 nt, Artificial Sequence
  LDLR targeting guide sequence portion
aaugaauuuggccagacacagg

SEQ ID NO: 7352 - RNA, 22 nt, Artificial Sequence
  LDLR targeting guide sequence portion
aaugaguuuggucucggugcca

SEQ ID NO: 7353 - RNA, 22 nt, Artificial Sequence
  LDLR targeting guide sequence portion
aaugaucuggcugaauccgugg

SEQ ID NO: 7354 - RNA, 22 nt, Artificial Sequence
  LDLR targeting guide sequence portion
aaugaugccacuucccagaggc

SEQ ID NO: 7355 - RNA, 22 nt, Artificial Sequence
  LDLR targeting guide sequence portion
aaugauguccccguuguaugua

SEQ ID NO: 7356 - RNA, 22 nt, Artificial Sequence
  LDLR targeting guide sequence portion
aaugccaaauguacacagugua

SEQ ID NO: 7357 - RNA, 22 nt, Artificial Sequence
  LDLR targeting guide sequence portion
aaugccggggacagagaggggc

SEQ ID NO: 7358 - RNA, 22 nt, Artificial Sequence
  LDLR targeting guide sequence portion
aaugccuccaagccauucacuu

SEQ ID NO: 7359 - RNA, 22 nt, Artificial Sequence
  LDLR targeting guide sequence portion
aaugccugagcucaaaccaucc

SEQ ID NO: 7360 - RNA, 22 nt, Artificial Sequence
  LDLR targeting guide sequence portion
aaugcgucccuguacagauagu

SEQ ID NO: 7361 - RNA, 22 nt, Artificial Sequence
  LDLR targeting guide sequence portion
aaugcuuuggucuucucugucu

SEQ ID NO: 7362 - RNA, 22 nt, Artificial Sequence
  LDLR targeting guide sequence portion
aauggaaguggguaggggucgg

SEQ ID NO: 7363 - RNA, 22 nt, Artificial Sequence
  LDLR targeting guide sequence portion
aauggaggugucauccuggucc

SEQ ID NO: 7364 - RNA, 22 nt, Artificial Sequence
  LDLR targeting guide sequence portion
aauggcaguucucgauauucac

SEQ ID NO: 7365 - RNA, 22 nt, Artificial Sequence
  LDLR targeting guide sequence portion
aauggcuuggaggcauuugcau

SEQ ID NO: 7366 - RNA, 22 nt, Artificial Sequence
  LDLR targeting guide sequence portion
aauggcuuggguugggauuuug

SEQ ID NO: 7367 - RNA, 22 nt, Artificial Sequence
  LDLR targeting guide sequence portion
aauguacacaguguacaacucu

SEQ ID NO: 7368 - RNA, 22 nt, Artificial Sequence
  LDLR targeting guide sequence portion
aauugaucacaguaagacauuc

SEQ ID NO: 7369 - RNA, 22 nt, Artificial Sequence
  LDLR targeting guide sequence portion
aauugccaaucccuugugacau

SEQ ID NO: 7370 - RNA, 22 nt, Artificial Sequence
  LDLR targeting guide sequence portion
aauuguccccagggacaaaaca

SEQ ID NO: 7371 - RNA, 22 nt, Artificial Sequence
  LDLR targeting guide sequence portion
aauuuggccagacacaggugcc

SEQ ID NO: 7372 - RNA, 22 nt, Artificial Sequence
  LDLR targeting guide sequence portion
acaaaaaauccccacuaucugu

SEQ ID NO: 7373 - RNA, 22 nt, Artificial Sequence
  LDLR targeting guide sequence portion
acaaacccaccucgaaagacac

SEQ ID NO: 7374 - RNA, 22 nt, Artificial Sequence
  LDLR targeting guide sequence portion
acaaagauuauuugcacgaacu

SEQ ID NO: 7375 - RNA, 22 nt, Artificial Sequence
  LDLR targeting guide sequence portion
acaaagcucuggcaggcaaugc

SEQ ID NO: 7376 - RNA, 22 nt, Artificial Sequence
  LDLR targeting guide sequence portion
acaaagugcaaacauaacaaaa

SEQ ID NO: 7377 - RNA, 22 nt, Artificial Sequence
  LDLR targeting guide sequence portion
acaaauacagcaaccaggguuu

SEQ ID NO: 7378 - RNA, 22 nt, Artificial Sequence
  LDLR targeting guide sequence portion
acaaaugccaaauguacacagu

SEQ ID NO: 7379 - RNA, 22 nt, Artificial Sequence
  LDLR targeting guide sequence portion
acaacagcagauggcaccaacg

SEQ ID NO: 7380 - RNA, 22 nt, Artificial Sequence
  LDLR targeting guide sequence portion
acaacggggacaucauucuccc

SEQ ID NO: 7381 - RNA, 22 nt, Artificial Sequence
  LDLR targeting guide sequence portion
acaacucugaacugagaaagug

SEQ ID NO: 7382 - RNA, 22 nt, Artificial Sequence
  LDLR targeting guide sequence portion
acaagauuggggaagugaaugg

SEQ ID NO: 7383 - RNA, 22 nt, Artificial Sequence
  LDLR targeting guide sequence portion
acaaggccggcgaggucucagg

SEQ ID NO: 7384 - RNA, 22 nt, Artificial Sequence
  LDLR targeting guide sequence portion
acaagggauuggcaauuguccc

SEQ ID NO: 7385 - RNA, 22 nt, Artificial Sequence
  LDLR targeting guide sequence portion
acaauccucaaacauggaagau

SEQ ID NO: 7386 - RNA, 22 nt, Artificial Sequence
  LDLR targeting guide sequence portion
acaauggcaguucucgauauuc

SEQ ID NO: 7387 - RNA, 22 nt, Artificial Sequence
  LDLR targeting guide sequence portion
acaauugccaaucccuugugac

SEQ ID NO: 7388 - RNA, 22 nt, Artificial Sequence
  LDLR targeting guide sequence portion
acacaaaugccaaauguacaca

SEQ ID NO: 7389 - RNA, 22 nt, Artificial Sequence
  LDLR targeting guide sequence portion
acacaacagcagauggcaccaa

SEQ ID NO: 7390 - RNA, 22 nt, Artificial Sequence
  LDLR targeting guide sequence portion
acacaauccucaaacauggaag

SEQ ID NO: 7391 - RNA, 22 nt, Artificial Sequence
  LDLR targeting guide sequence portion
acacacaacagcagauggcacc

SEQ ID NO: 7392 - RNA, 22 nt, Artificial Sequence
  LDLR targeting guide sequence portion
acacacacgacagaaaacagug

SEQ ID NO: 7393 - RNA, 22 nt, Artificial Sequence
  LDLR targeting guide sequence portion
acacacgacagaaaacagugca

SEQ ID NO: 7394 - RNA, 22 nt, Artificial Sequence
  LDLR targeting guide sequence portion
acacagggccccgagaauaguc

SEQ ID NO: 7395 - RNA, 22 nt, Artificial Sequence
  LDLR targeting guide sequence portion
acacaggugccucacgccugua

SEQ ID NO: 7396 - RNA, 22 nt, Artificial Sequence
  LDLR targeting guide sequence portion
acacaguccaguucgugcaaau

SEQ ID NO: 7397 - RNA, 22 nt, Artificial Sequence
  LDLR targeting guide sequence portion
acacaguguacaacucugaacu

SEQ ID NO: 7398 - RNA, 22 nt, Artificial Sequence
  LDLR targeting guide sequence portion
acacaguguuuugucccugggg

SEQ ID NO: 7399 - RNA, 22 nt, Artificial Sequence
  LDLR targeting guide sequence portion
acacauacccaucaacgacaag

SEQ ID NO: 7400 - RNA, 22 nt, Artificial Sequence
  LDLR targeting guide sequence portion
acaccagccuggugcccauccu

SEQ ID NO: 7401 - RNA, 22 nt, Artificial Sequence
  LDLR targeting guide sequence portion
acacccaucucccagaagccac

SEQ ID NO: 7402 - RNA, 22 nt, Artificial Sequence
  LDLR targeting guide sequence portion
acacccgguuaccuuggccgug

SEQ ID NO: 7403 - RNA, 22 nt, Artificial Sequence
  LDLR targeting guide sequence portion
acaccuccauuucucuccagga

SEQ ID NO: 7404 - RNA, 22 nt, Artificial Sequence
  LDLR targeting guide sequence portion
acaccugggugcaggccacgug

SEQ ID NO: 7405 - RNA, 22 nt, Artificial Sequence
  LDLR targeting guide sequence portion
acacgacagaaaacagugcaaa

SEQ ID NO: 7406 - RNA, 22 nt, Artificial Sequence
  LDLR targeting guide sequence portion
acacggcgauuucagaaagaac

SEQ ID NO: 7407 - RNA, 22 nt, Artificial Sequence
  LDLR targeting guide sequence portion
acacgggcuuucccuggccugg

SEQ ID NO: 7408 - RNA, 22 nt, Artificial Sequence
  LDLR targeting guide sequence portion
acacguggccugcacccaggug

SEQ ID NO: 7409 - RNA, 22 nt, Artificial Sequence
  LDLR targeting guide sequence portion
acacguugacuccugaguuuag

SEQ ID NO: 7410 - RNA, 22 nt, Artificial Sequence
  LDLR targeting guide sequence portion
acacugggugggucaugauucg

SEQ ID NO: 7411 - RNA, 22 nt, Artificial Sequence
  LDLR targeting guide sequence portion
acacuguguacauuuggcauuu

SEQ ID NO: 7412 - RNA, 22 nt, Artificial Sequence
  LDLR targeting guide sequence portion
acagagaagaccaaagcauugc

SEQ ID NO: 7413 - RNA, 22 nt, Artificial Sequence
  LDLR targeting guide sequence portion
acagagaggggcagguugaccg

SEQ ID NO: 7414 - RNA, 22 nt, Artificial Sequence
  LDLR targeting guide sequence portion
acagauaguggggauuuuuugu

SEQ ID NO: 7415 - RNA, 22 nt, Artificial Sequence
  LDLR targeting guide sequence portion
acagaugaagacccuauuucag

SEQ ID NO: 7416 - RNA, 22 nt, Artificial Sequence
  LDLR targeting guide sequence portion
acagauggucagucuggaggau

SEQ ID NO: 7417 - RNA, 22 nt, Artificial Sequence
  LDLR targeting guide sequence portion
acagcaaccaggguuugcaaaa

SEQ ID NO: 7418 - RNA, 22 nt, Artificial Sequence
  LDLR targeting guide sequence portion
acagcagauggcaccaacggga

SEQ ID NO: 7419 - RNA, 22 nt, Artificial Sequence
  LDLR targeting guide sequence portion
acagccacaccugggugcaggc

SEQ ID NO: 7420 - RNA, 22 nt, Artificial Sequence
  LDLR targeting guide sequence portion
acagccagguuagccuuugccc

SEQ ID NO: 7421 - RNA, 22 nt, Artificial Sequence
  LDLR targeting guide sequence portion
acagccucaaaugccugagcuc

SEQ ID NO: 7422 - RNA, 22 nt, Artificial Sequence
  LDLR targeting guide sequence portion
acagccuccgucagacucccgc

SEQ ID NO: 7423 - RNA, 22 nt, Artificial Sequence
  LDLR targeting guide sequence portion
acaggcacgugccaccguaccc

SEQ ID NO: 7424 - RNA, 22 nt, Artificial Sequence
  LDLR targeting guide sequence portion
acaggcccggggggaccaggau

SEQ ID NO: 7425 - RNA, 22 nt, Artificial Sequence
  LDLR targeting guide sequence portion
acaggcgugaggcaccuguguc

SEQ ID NO: 7426 - RNA, 22 nt, Artificial Sequence
  LDLR targeting guide sequence portion
acaggcuucggacagugcccau

SEQ ID NO: 7427 - RNA, 22 nt, Artificial Sequence
  LDLR targeting guide sequence portion
acagggacgcauuuacgugcuc

SEQ ID NO: 7428 - RNA, 22 nt, Artificial Sequence
  LDLR targeting guide sequence portion
acagggcaaaggcuaaccuggc

SEQ ID NO: 7429 - RNA, 22 nt, Artificial Sequence
  LDLR targeting guide sequence portion
acagggccccgagaauagucac

SEQ ID NO: 7430 - RNA, 22 nt, Artificial Sequence
  LDLR targeting guide sequence portion
acaggugccucacgccuguaau

SEQ ID NO: 7431 - RNA, 22 nt, Artificial Sequence
  LDLR targeting guide sequence portion
acaguaacacggcgauuucaga

SEQ ID NO: 7432 - RNA, 22 nt, Artificial Sequence
  LDLR targeting guide sequence portion
acaguaagacauucaggcuaca

SEQ ID NO: 7433 - RNA, 22 nt, Artificial Sequence
  LDLR targeting guide sequence portion
acaguccaguucgugcaaauaa

SEQ ID NO: 7434 - RNA, 22 nt, Artificial Sequence
  LDLR targeting guide sequence portion
acagugacagccuccgucagac

SEQ ID NO: 7435 - RNA, 22 nt, Artificial Sequence
  LDLR targeting guide sequence portion
acagugcaaaauaauaacacaa

SEQ ID NO: 7436 - RNA, 22 nt, Artificial Sequence
  LDLR targeting guide sequence portion
acagugcccaugcaauggcuug

SEQ ID NO: 7437 - RNA, 22 nt, Artificial Sequence
  LDLR targeting guide sequence portion
acagugguuuaaaaagugacac

SEQ ID NO: 7438 - RNA, 22 nt, Artificial Sequence
  LDLR targeting guide sequence portion
acaguguacaacucugaacuga

SEQ ID NO: 7439 - RNA, 22 nt, Artificial Sequence
  LDLR targeting guide sequence portion
acaguguuuugucccuggggac

SEQ ID NO: 7440 - RNA, 22 nt, Artificial Sequence
  LDLR targeting guide sequence portion
acaguuucaaccaauauacaaa

SEQ ID NO: 7441 - RNA, 22 nt, Artificial Sequence
  LDLR targeting guide sequence portion
acauaaagaagaggcauuucag

SEQ ID NO: 7442 - RNA, 22 nt, Artificial Sequence
  LDLR targeting guide sequence portion
acauaaagacgacaauggcagu

SEQ ID NO: 7443 - RNA, 22 nt, Artificial Sequence
  LDLR targeting guide sequence portion
acauaacaaaaaauccccacua

SEQ ID NO: 7444 - RNA, 22 nt, Artificial Sequence
  LDLR targeting guide sequence portion
acauacaacggggacaucauuc

SEQ ID NO: 7445 - RNA, 22 nt, Artificial Sequence
  LDLR targeting guide sequence portion
acauacccaucaacgacaagau

SEQ ID NO: 7446 - RNA, 22 nt, Artificial Sequence
  LDLR targeting guide sequence portion
acaucagugcaacaguaacacg

SEQ ID NO: 7447 - RNA, 22 nt, Artificial Sequence
  LDLR targeting guide sequence portion
acaucauucucccaaaaagcgu

SEQ ID NO: 7448 - RNA, 22 nt, Artificial Sequence
  LDLR targeting guide sequence portion
acauccccuccccuuucaucuu

SEQ ID NO: 7449 - RNA, 22 nt, Artificial Sequence
  LDLR targeting guide sequence portion
acaucugccuggagucccgucc

SEQ ID NO: 7450 - RNA, 22 nt, Artificial Sequence
  LDLR targeting guide sequence portion
acaucuucacgcgggagucuga

SEQ ID NO: 7451 - RNA, 22 nt, Artificial Sequence
  LDLR targeting guide sequence portion
acaugcacggugaggccgggcg

SEQ ID NO: 7452 - RNA, 22 nt, Artificial Sequence
  LDLR targeting guide sequence portion
acauggaagaugaaaggggagg

SEQ ID NO: 7453 - RNA, 22 nt, Artificial Sequence
  LDLR targeting guide sequence portion
acauucaggcuacaaaaaccuu

SEQ ID NO: 7454 - RNA, 22 nt, Artificial Sequence
  LDLR targeting guide sequence portion
accaaaaaguuaaaaaucagcu

SEQ ID NO: 7455 - RNA, 22 nt, Artificial Sequence
  LDLR targeting guide sequence portion
accaaaaucccaacccaagcca

SEQ ID NO: 7456 - RNA, 22 nt, Artificial Sequence
  LDLR targeting guide sequence portion
accaaacucauucaccaaauga

SEQ ID NO: 7457 - RNA, 22 nt, Artificial Sequence
  LDLR targeting guide sequence portion
accaaagcauugccugccagag

SEQ ID NO: 7458 - RNA, 22 nt, Artificial Sequence
  LDLR targeting guide sequence portion
accaaaugaugccacuucccag

SEQ ID NO: 7459 - RNA, 22 nt, Artificial Sequence
  LDLR targeting guide sequence portion
accaacgggacccccuggcccu

SEQ ID NO: 7460 - RNA, 22 nt, Artificial Sequence
  LDLR targeting guide sequence portion
accaaucucuaagccaaacccc

SEQ ID NO: 7461 - RNA, 22 nt, Artificial Sequence
  LDLR targeting guide sequence portion
accacggauucagccagaucau

SEQ ID NO: 7462 - RNA, 22 nt, Artificial Sequence
  LDLR targeting guide sequence portion
accacgggaauggaagugggua

SEQ ID NO: 7463 - RNA, 22 nt, Artificial Sequence
  LDLR targeting guide sequence portion
accacuguauagaagguuuuug

SEQ ID NO: 7464 - RNA, 22 nt, Artificial Sequence
  LDLR targeting guide sequence portion
accagaaaggcuuaucacgguu

SEQ ID NO: 7465 - RNA, 22 nt, Artificial Sequence
  LDLR targeting guide sequence portion
accagccuggugcccauccucc

SEQ ID NO: 7466 - RNA, 22 nt, Artificial Sequence
  LDLR targeting guide sequence portion
accaggaugacaccuccauuuc

SEQ ID NO: 7467 - RNA, 22 nt, Artificial Sequence
  LDLR targeting guide sequence portion
accaggccugagcaacaaagcg

SEQ ID NO: 7468 - RNA, 22 nt, Artificial Sequence
  LDLR targeting guide sequence portion
accaggcugguguccugacagc

SEQ ID NO: 7469 - RNA, 22 nt, Artificial Sequence
  LDLR targeting guide sequence portion
accagugacucaggcucugccu

SEQ ID NO: 7470 - RNA, 22 nt, Artificial Sequence
  LDLR targeting guide sequence portion
accauccucccaccucagccuc

SEQ ID NO: 7471 - RNA, 22 nt, Artificial Sequence
  LDLR targeting guide sequence portion
accaugcauggugcaucagcag

SEQ ID NO: 7472 - RNA, 22 nt, Artificial Sequence
  LDLR targeting guide sequence portion
acccaagccauugcaugggcac

SEQ ID NO: 7473 - RNA, 22 nt, Artificial Sequence
  LDLR targeting guide sequence portion
acccacccagugucuuucgagg

SEQ ID NO: 7474 - RNA, 22 nt, Artificial Sequence
  LDLR targeting guide sequence portion
acccaccucgaaagacacuggg

SEQ ID NO: 7475 - RNA, 22 nt, Artificial Sequence
  LDLR targeting guide sequence portion
acccacuuccauucccgugguc

SEQ ID NO: 7476 - RNA, 22 nt, Artificial Sequence
  LDLR targeting guide sequence portion
acccagcugauuuuuaacuuuu

SEQ ID NO: 7477 - RNA, 22 nt, Artificial Sequence
  LDLR targeting guide sequence portion
acccagguguggcugucaggac

SEQ ID NO: 7478 - RNA, 22 nt, Artificial Sequence
  LDLR targeting guide sequence portion
acccagugucuuucgagguggg

SEQ ID NO: 7479 - RNA, 22 nt, Artificial Sequence
  LDLR targeting guide sequence portion
acccaucaacgacaagauuggg

SEQ ID NO: 7480 - RNA, 22 nt, Artificial Sequence
  LDLR targeting guide sequence portion
acccaucucccagaagccacuc

SEQ ID NO: 7481 - RNA, 22 nt, Artificial Sequence
  LDLR targeting guide sequence portion
accccaucucuuaaaaaaugaa

SEQ ID NO: 7482 - RNA, 22 nt, Artificial Sequence
  LDLR targeting guide sequence portion
acccccgaaucaugacccaccc

SEQ ID NO: 7483 - RNA, 22 nt, Artificial Sequence
  LDLR targeting guide sequence portion
acccccuacacagggccccgag

SEQ ID NO: 7484 - RNA, 22 nt, Artificial Sequence
  LDLR targeting guide sequence portion
acccccuggcccugccucaucc

SEQ ID NO: 7485 - RNA, 22 nt, Artificial Sequence
  LDLR targeting guide sequence portion
accccuaaacucaggagucaac

SEQ ID NO: 7486 - RNA, 22 nt, Artificial Sequence
  LDLR targeting guide sequence portion
accccuacccacuuccauuccc

SEQ ID NO: 7487 - RNA, 22 nt, Artificial Sequence
  LDLR targeting guide sequence portion
acccgguuaccuuggccgugag

SEQ ID NO: 7488 - RNA, 22 nt, Artificial Sequence
  LDLR targeting guide sequence portion
acccugguugcuguauuuguuc

SEQ ID NO: 7489 - RNA, 22 nt, Artificial Sequence
  LDLR targeting guide sequence portion
acccuuaauauuuauuaagugc

SEQ ID NO: 7490 - RNA, 22 nt, Artificial Sequence
  LDLR targeting guide sequence portion
acccuuccugagaccucgccgg

SEQ ID NO: 7491 - RNA, 22 nt, Artificial Sequence
  LDLR targeting guide sequence portion
accgagaccaaacucauucacc

SEQ ID NO: 7492 - RNA, 22 nt, Artificial Sequence
  LDLR targeting guide sequence portion
accgggacuucaaagccgugau

SEQ ID NO: 7493 - RNA, 22 nt, Artificial Sequence
  LDLR targeting guide sequence portion
accgggugucucaggcacuuaa

SEQ ID NO: 7494 - RNA, 22 nt, Artificial Sequence
  LDLR targeting guide sequence portion
accguacccagcugauuuuuaa

SEQ ID NO: 7495 - RNA, 22 nt, Artificial Sequence
  LDLR targeting guide sequence portion
accgugacacaauccucaaaca

SEQ ID NO: 7496 - RNA, 22 nt, Artificial Sequence
  LDLR targeting guide sequence portion
accgugauaagccuuucugguu

SEQ ID NO: 7497 - RNA, 22 nt, Artificial Sequence
  LDLR targeting guide sequence portion
accgugcauguuuuaaacacau

SEQ ID NO: 7498 - RNA, 22 nt, Artificial Sequence
  LDLR targeting guide sequence portion
accuagugcuuccacuucuaug

SEQ ID NO: 7499 - RNA, 22 nt, Artificial Sequence
  LDLR targeting guide sequence portion
accuccauuucucuccaggaag

SEQ ID NO: 7500 - RNA, 22 nt, Artificial Sequence
  LDLR targeting guide sequence portion
accucgaaagacacuggguggg

SEQ ID NO: 7501 - RNA, 22 nt, Artificial Sequence
  LDLR targeting guide sequence portion
accucgccggccuuguuuuauu

SEQ ID NO: 7502 - RNA, 22 nt, Artificial Sequence
  LDLR targeting guide sequence portion
accucuucuaugcaagccuugc

SEQ ID NO: 7503 - RNA, 22 nt, Artificial Sequence
  LDLR targeting guide sequence portion
accugaagucccgucaaacgau

SEQ ID NO: 7504 - RNA, 22 nt, Artificial Sequence
  LDLR targeting guide sequence portion
accugccccucucuguccccgg

SEQ ID NO: 7505 - RNA, 22 nt, Artificial Sequence
  LDLR targeting guide sequence portion
accuggcugucuagcaaggcuu

SEQ ID NO: 7506 - RNA, 22 nt, Artificial Sequence
  LDLR targeting guide sequence portion
accugggugcaggccacguguc

SEQ ID NO: 7507 - RNA, 22 nt, Artificial Sequence
  LDLR targeting guide sequence portion
accugugucuggccaaauucau

SEQ ID NO: 7508 - RNA, 22 nt, Artificial Sequence
  LDLR targeting guide sequence portion
accuuccuuaagccaggaaagg

SEQ ID NO: 7509 - RNA, 22 nt, Artificial Sequence
  LDLR targeting guide sequence portion
accuucuauacagugguuuaaa

SEQ ID NO: 7510 - RNA, 22 nt, Artificial Sequence
  LDLR targeting guide sequence portion
accuuggccgugaggacacgug

SEQ ID NO: 7511 - RNA, 22 nt, Artificial Sequence
  LDLR targeting guide sequence portion
acgaacuggacugugugcaacg

SEQ ID NO: 7512 - RNA, 22 nt, Artificial Sequence
  LDLR targeting guide sequence portion
acgacaagauuggggaagugaa

SEQ ID NO: 7513 - RNA, 22 nt, Artificial Sequence
  LDLR targeting guide sequence portion
acgacaauggcaguucucgaua

SEQ ID NO: 7514 - RNA, 22 nt, Artificial Sequence
  LDLR targeting guide sequence portion
acgacagaaaacagugcaaaau

SEQ ID NO: 7515 - RNA, 22 nt, Artificial Sequence
  LDLR targeting guide sequence portion
acgacagccucaaaugccugag

SEQ ID NO: 7516 - RNA, 22 nt, Artificial Sequence
  LDLR targeting guide sequence portion
acgaggaaaggaagaaaccaaa

SEQ ID NO: 7517 - RNA, 22 nt, Artificial Sequence
  LDLR targeting guide sequence portion
acgaucacggcuuugaaguccc

SEQ ID NO: 7518 - RNA, 22 nt, Artificial Sequence
  LDLR targeting guide sequence portion
acgauccagacuggaggauuua

SEQ ID NO: 7519 - RNA, 22 nt, Artificial Sequence
  LDLR targeting guide sequence portion
acgcauuuacgugcuccgaaac

SEQ ID NO: 7520 - RNA, 22 nt, Artificial Sequence
  LDLR targeting guide sequence portion
acgccacgucauccuccagacu

SEQ ID NO: 7521 - RNA, 22 nt, Artificial Sequence
  LDLR targeting guide sequence portion
acgccaugaaucccuuuccugg

SEQ ID NO: 7522 - RNA, 22 nt, Artificial Sequence
  LDLR targeting guide sequence portion
acgcgggagucugacggaggcu

SEQ ID NO: 7523 - RNA, 22 nt, Artificial Sequence
  LDLR targeting guide sequence portion
acgcuuuuugggagaaugaugu

SEQ ID NO: 7524 - RNA, 22 nt, Artificial Sequence
  LDLR targeting guide sequence portion
acggaggcugucacugucucuc

SEQ ID NO: 7525 - RNA, 22 nt, Artificial Sequence
  LDLR targeting guide sequence portion
acggauucagccagaucauuuc

SEQ ID NO: 7526 - RNA, 22 nt, Artificial Sequence
  LDLR targeting guide sequence portion
acggccaagguaaccggguguc

SEQ ID NO: 7527 - RNA, 22 nt, Artificial Sequence
  LDLR targeting guide sequence portion
acggcgauuucagaaagaaccu

SEQ ID NO: 7528 - RNA, 22 nt, Artificial Sequence
  LDLR targeting guide sequence portion
acggcuuugaagucccggucaa

SEQ ID NO: 7529 - RNA, 22 nt, Artificial Sequence
  LDLR targeting guide sequence portion
acgggaauggaaguggguaggg

SEQ ID NO: 7530 - RNA, 22 nt, Artificial Sequence
  LDLR targeting guide sequence portion
acgggacccccuggcccugccu

SEQ ID NO: 7531 - RNA, 22 nt, Artificial Sequence
  LDLR targeting guide sequence portion
acgggacuccaggcagauguuc

SEQ ID NO: 7532 - RNA, 22 nt, Artificial Sequence
  LDLR targeting guide sequence portion
acgggacuucagguucuuucug

SEQ ID NO: 7533 - RNA, 22 nt, Artificial Sequence
  LDLR targeting guide sequence portion
acgggcuuucccuggccuggga

SEQ ID NO: 7534 - RNA, 22 nt, Artificial Sequence
  LDLR targeting guide sequence portion
acggggacaucauucucccaaa

SEQ ID NO: 7535 - RNA, 22 nt, Artificial Sequence
  LDLR targeting guide sequence portion
acggugaggccgggcgcagugg

SEQ ID NO: 7536 - RNA, 22 nt, Artificial Sequence
  LDLR targeting guide sequence portion
acgguggagagaaacucaaaac

SEQ ID NO: 7537 - RNA, 22 nt, Artificial Sequence
  LDLR targeting guide sequence portion
acguaaaugcgucccuguacag

SEQ ID NO: 7538 - RNA, 22 nt, Artificial Sequence
  LDLR targeting guide sequence portion
acgucauccuccagacugacca

SEQ ID NO: 7539 - RNA, 22 nt, Artificial Sequence
  LDLR targeting guide sequence portion
acgugccaccguacccagcuga

SEQ ID NO: 7540 - RNA, 22 nt, Artificial Sequence
  LDLR targeting guide sequence portion
acgugcuccgaaaccagaaagg

SEQ ID NO: 7541 - RNA, 22 nt, Artificial Sequence
  LDLR targeting guide sequence portion
acguggccugcacccaggugug

SEQ ID NO: 7542 - RNA, 22 nt, Artificial Sequence
  LDLR targeting guide sequence portion
acguggcgugaacaucugccug

SEQ ID NO: 7543 - RNA, 22 nt, Artificial Sequence
  LDLR targeting guide sequence portion
acguguccucacggccaaggua

SEQ ID NO: 7544 - RNA, 22 nt, Artificial Sequence
  LDLR targeting guide sequence portion
acguguuuaccucuucuaugca

SEQ ID NO: 7545 - RNA, 22 nt, Artificial Sequence
  LDLR targeting guide sequence portion
acguugacuccugaguuuaggg

SEQ ID NO: 7546 - RNA, 22 nt, Artificial Sequence
  LDLR targeting guide sequence portion
acuaggugggcggacauaaaga

SEQ ID NO: 7547 - RNA, 22 nt, Artificial Sequence
  LDLR targeting guide sequence portion
acuaucuguacagggacgcauu

SEQ ID NO: 7548 - RNA, 22 nt, Artificial Sequence
  LDLR targeting guide sequence portion
acuauguugcccaggcuggaaa

SEQ ID NO: 7549 - RNA, 22 nt, Artificial Sequence
  LDLR targeting guide sequence portion
acuauucucggggcccugugua

SEQ ID NO: 7550 - RNA, 22 nt, Artificial Sequence
  LDLR targeting guide sequence portion
acucaaaacuuccuggagagaa

SEQ ID NO: 7551 - RNA, 22 nt, Artificial Sequence
  LDLR targeting guide sequence portion
acucaagugauccagcucagcc

SEQ ID NO: 7552 - RNA, 22 nt, Artificial Sequence
  LDLR targeting guide sequence portion
acucaggagucaacguguuuac

SEQ ID NO: 7553 - RNA, 22 nt, Artificial Sequence
  LDLR targeting guide sequence portion
acucaggcucugccucugggaa

SEQ ID NO: 7554 - RNA, 22 nt, Artificial Sequence
  LDLR targeting guide sequence portion
acucauacauacaacggggaca

SEQ ID NO: 7555 - RNA, 22 nt, Artificial Sequence
  LDLR targeting guide sequence portion
acucauucaccaaaugaugcca

SEQ ID NO: 7556 - RNA, 22 nt, Artificial Sequence
  LDLR targeting guide sequence portion
acuccaggcagauguucacgcc

SEQ ID NO: 7557 - RNA, 22 nt, Artificial Sequence
  LDLR targeting guide sequence portion
acucccgcgugaagaugucaca

SEQ ID NO: 7558 - RNA, 22 nt, Artificial Sequence
  LDLR targeting guide sequence portion
acuccugaacucaagugaucca

SEQ ID NO: 7559 - RNA, 22 nt, Artificial Sequence
  LDLR targeting guide sequence portion
acuccugaguuuagggguuugg

SEQ ID NO: 7560 - RNA, 22 nt, Artificial Sequence
  LDLR targeting guide sequence portion
acucugaacugagaaagugcaa

SEQ ID NO: 7561 - RNA, 22 nt, Artificial Sequence
  LDLR targeting guide sequence portion
acugagaaagugcaaggagacc

SEQ ID NO: 7562 - RNA, 22 nt, Artificial Sequence
  LDLR targeting guide sequence portion
acugauguccggagagacagug

SEQ ID NO: 7563 - RNA, 22 nt, Artificial Sequence
  LDLR targeting guide sequence portion
acugccauugucgucuuuaugu

SEQ ID NO: 7564 - RNA, 22 nt, Artificial Sequence
  LDLR targeting guide sequence portion
acugcgcccggccucaccgugc

SEQ ID NO: 7565 - RNA, 22 nt, Artificial Sequence
  LDLR targeting guide sequence portion
acugcuuuccagccugggcaac

SEQ ID NO: 7566 - RNA, 22 nt, Artificial Sequence
  LDLR targeting guide sequence portion
acuggacugugugcaacgcuuu

SEQ ID NO: 7567 - RNA, 22 nt, Artificial Sequence
  LDLR targeting guide sequence portion
acugggugggucaugauucggg

SEQ ID NO: 7568 - RNA, 22 nt, Artificial Sequence
  LDLR targeting guide sequence portion
acuggucacccuuaauauuuau

SEQ ID NO: 7569 - RNA, 22 nt, Artificial Sequence
  LDLR targeting guide sequence portion
acuguauagaagguuuuuguag

SEQ ID NO: 7570 - RNA, 22 nt, Artificial Sequence
  LDLR targeting guide sequence portion
acuguccgaagccuguucugcc

SEQ ID NO: 7571 - RNA, 22 nt, Artificial Sequence
  LDLR targeting guide sequence portion
acugucucuccggacaucagug

SEQ ID NO: 7572 - RNA, 22 nt, Artificial Sequence
  LDLR targeting guide sequence portion
acuguguacauuuggcauuugu

SEQ ID NO: 7573 - RNA, 22 nt, Artificial Sequence
  LDLR targeting guide sequence portion
acugugugcaacgcuuuuuggg

SEQ ID NO: 7574 - RNA, 22 nt, Artificial Sequence
  LDLR targeting guide sequence portion
acuguugcacugauguccggag

SEQ ID NO: 7575 - RNA, 22 nt, Artificial Sequence
  LDLR targeting guide sequence portion
acuguuuucugucguguguguu

SEQ ID NO: 7576 - RNA, 22 nt, Artificial Sequence
  LDLR targeting guide sequence portion
acuuaauaaauauuaaggguga

SEQ ID NO: 7577 - RNA, 22 nt, Artificial Sequence
  LDLR targeting guide sequence portion
acuucaaagccgugaucgugaa

SEQ ID NO: 7578 - RNA, 22 nt, Artificial Sequence
  LDLR targeting guide sequence portion
acuucagguucuuucugaaauc

SEQ ID NO: 7579 - RNA, 22 nt, Artificial Sequence
  LDLR targeting guide sequence portion
acuuccauucccguggucuccu

SEQ ID NO: 7580 - RNA, 22 nt, Artificial Sequence
  LDLR targeting guide sequence portion
acuucccagaggcagagccuga

SEQ ID NO: 7581 - RNA, 22 nt, Artificial Sequence
  LDLR targeting guide sequence portion
acuuccccaaucuugucguuga

SEQ ID NO: 7582 - RNA, 22 nt, Artificial Sequence
  LDLR targeting guide sequence portion
acuuccuggagagaaauggagg

SEQ ID NO: 7583 - RNA, 22 nt, Artificial Sequence
  LDLR targeting guide sequence portion
acuucuaugcaaaugccuccaa

SEQ ID NO: 7584 - RNA, 22 nt, Artificial Sequence
  LDLR targeting guide sequence portion
acuugcuucucugggccugaca

SEQ ID NO: 7585 - RNA, 22 nt, Artificial Sequence
  LDLR targeting guide sequence portion
acuuucucaguucagaguugua

SEQ ID NO: 7586 - RNA, 22 nt, Artificial Sequence
  LDLR targeting guide sequence portion
acuuugggaggcugagcuggau

SEQ ID NO: 7587 - RNA, 22 nt, Artificial Sequence
  LDLR targeting guide sequence portion
acuuuuugguuuuuguagagau

SEQ ID NO: 7588 - RNA, 22 nt, Artificial Sequence
  LDLR targeting guide sequence portion
agaaacaggcccggggggacca

SEQ ID NO: 7589 - RNA, 22 nt, Artificial Sequence
  LDLR targeting guide sequence portion
agaaaccaaaaucccaacccaa

SEQ ID NO: 7590 - RNA, 22 nt, Artificial Sequence
  LDLR targeting guide sequence portion
agaaacucaaaacuuccuggag

SEQ ID NO: 7591 - RNA, 22 nt, Artificial Sequence
  LDLR targeting guide sequence portion
agaaagaaccugaagucccguc

SEQ ID NO: 7592 - RNA, 22 nt, Artificial Sequence
  LDLR targeting guide sequence portion
agaaaggcuuaucacgguuccc

SEQ ID NO: 7593 - RNA, 22 nt, Artificial Sequence
  LDLR targeting guide sequence portion
agaaagugcaaggagaccacgg

SEQ ID NO: 7594 - RNA, 22 nt, Artificial Sequence
  LDLR targeting guide sequence portion
agaaauggaggugucauccugg

SEQ ID NO: 7595 - RNA, 22 nt, Artificial Sequence
  LDLR targeting guide sequence portion
agaacaggcuucggacagugcc

SEQ ID NO: 7596 - RNA, 22 nt, Artificial Sequence
  LDLR targeting guide sequence portion
agaacccuuccugagaccucgc

SEQ ID NO: 7597 - RNA, 22 nt, Artificial Sequence
  LDLR targeting guide sequence portion
agaaccugaagucccgucaaac

SEQ ID NO: 7598 - RNA, 22 nt, Artificial Sequence
  LDLR targeting guide sequence portion
agaacugccauugucgucuuua

SEQ ID NO: 7599 - RNA, 22 nt, Artificial Sequence
  LDLR targeting guide sequence portion
agaagaccaaagcauugccugc

SEQ ID NO: 7600 - RNA, 22 nt, Artificial Sequence
  LDLR targeting guide sequence portion
agaagaggcauuucagaggcaa

SEQ ID NO: 7601 - RNA, 22 nt, Artificial Sequence
  LDLR targeting guide sequence portion
agaagagguaaacacguugacu

SEQ ID NO: 7602 - RNA, 22 nt, Artificial Sequence
  LDLR targeting guide sequence portion
agaagcaaguggcuuucaacac

SEQ ID NO: 7603 - RNA, 22 nt, Artificial Sequence
  LDLR targeting guide sequence portion
agaagccacucauacauacaac

SEQ ID NO: 7604 - RNA, 22 nt, Artificial Sequence
  LDLR targeting guide sequence portion
agaagguuuuuguagccugaau

SEQ ID NO: 7605 - RNA, 22 nt, Artificial Sequence
  LDLR targeting guide sequence portion
agaaguggaagcacuagguggg

SEQ ID NO: 7606 - RNA, 22 nt, Artificial Sequence
  LDLR targeting guide sequence portion
agaauagucacugaacaaauac

SEQ ID NO: 7607 - RNA, 22 nt, Artificial Sequence
  LDLR targeting guide sequence portion
agaaugauguccccguuguaug

SEQ ID NO: 7608 - RNA, 22 nt, Artificial Sequence
  LDLR targeting guide sequence portion
agacacaggugccucacgccug

SEQ ID NO: 7609 - RNA, 22 nt, Artificial Sequence
  LDLR targeting guide sequence portion
agacacccgguuaccuuggccg

SEQ ID NO: 7610 - RNA, 22 nt, Artificial Sequence
  LDLR targeting guide sequence portion
agacacugggugggucaugauu

SEQ ID NO: 7611 - RNA, 22 nt, Artificial Sequence
  LDLR targeting guide sequence portion
agacagagaagaccaaagcauu

SEQ ID NO: 7612 - RNA, 22 nt, Artificial Sequence
  LDLR targeting guide sequence portion
agacagauggucagucuggagg

SEQ ID NO: 7613 - RNA, 22 nt, Artificial Sequence
  LDLR targeting guide sequence portion
agacagccagguuagccuuugc

SEQ ID NO: 7614 - RNA, 22 nt, Artificial Sequence
  LDLR targeting guide sequence portion
agacagugacagccuccgucag

SEQ ID NO: 7615 - RNA, 22 nt, Artificial Sequence
  LDLR targeting guide sequence portion
agacauucaggcuacaaaaacc

SEQ ID NO: 7616 - RNA, 22 nt, Artificial Sequence
  LDLR targeting guide sequence portion
agaccaaacucauucaccaaau

SEQ ID NO: 7617 - RNA, 22 nt, Artificial Sequence
  LDLR targeting guide sequence portion
agaccaaagcauugccugccag

SEQ ID NO: 7618 - RNA, 22 nt, Artificial Sequence
  LDLR targeting guide sequence portion
agaccacgggaauggaaguggg

SEQ ID NO: 7619 - RNA, 22 nt, Artificial Sequence
  LDLR targeting guide sequence portion
agaccaggccugagcaacaaag

SEQ ID NO: 7620 - RNA, 22 nt, Artificial Sequence
  LDLR targeting guide sequence portion
agaccccaucucuuaaaaaaug

SEQ ID NO: 7621 - RNA, 22 nt, Artificial Sequence
  LDLR targeting guide sequence portion
agaccucgccggccuuguuuua

SEQ ID NO: 7622 - RNA, 22 nt, Artificial Sequence
  LDLR targeting guide sequence portion
agacgacaauggcaguucucga

SEQ ID NO: 7623 - RNA, 22 nt, Artificial Sequence
  LDLR targeting guide sequence portion
agacucccgcgugaagauguca

SEQ ID NO: 7624 - RNA, 22 nt, Artificial Sequence
  LDLR targeting guide sequence portion
agagaaacaggcccggggggac

SEQ ID NO: 7625 - RNA, 22 nt, Artificial Sequence
  LDLR targeting guide sequence portion
agagaaacucaaaacuuccugg

SEQ ID NO: 7626 - RNA, 22 nt, Artificial Sequence
  LDLR targeting guide sequence portion
agagaaauggaggugucauccu

SEQ ID NO: 7627 - RNA, 22 nt, Artificial Sequence
  LDLR targeting guide sequence portion
agagaagaccaaagcauugccu

SEQ ID NO: 7628 - RNA, 22 nt, Artificial Sequence
  LDLR targeting guide sequence portion
agagaagcaaguggcuuucaac

SEQ ID NO: 7629 - RNA, 22 nt, Artificial Sequence
  LDLR targeting guide sequence portion
agagacagugacagccuccguc

SEQ ID NO: 7630 - RNA, 22 nt, Artificial Sequence
  LDLR targeting guide sequence portion
agagaggggcagguugaccggg

SEQ ID NO: 7631 - RNA, 22 nt, Artificial Sequence
  LDLR targeting guide sequence portion
agagaugggaucucgcuuuguu

SEQ ID NO: 7632 - RNA, 22 nt, Artificial Sequence
  LDLR targeting guide sequence portion
agagauugguggaugaggcagg

SEQ ID NO: 7633 - RNA, 22 nt, Artificial Sequence
  LDLR targeting guide sequence portion
agagccugagucacuggucacc

SEQ ID NO: 7634 - RNA, 22 nt, Artificial Sequence
  LDLR targeting guide sequence portion
agaggcaauaacccccuacaca

SEQ ID NO: 7635 - RNA, 22 nt, Artificial Sequence
  LDLR targeting guide sequence portion
agaggcagagccugagucacug

SEQ ID NO: 7636 - RNA, 22 nt, Artificial Sequence
  LDLR targeting guide sequence portion
agaggcauuucagaggcaauaa

SEQ ID NO: 7637 - RNA, 22 nt, Artificial Sequence
  LDLR targeting guide sequence portion
agaggccaugggcugcugaugc

SEQ ID NO: 7638 - RNA, 22 nt, Artificial Sequence
  LDLR targeting guide sequence portion
agaggggcagguugaccgggac

SEQ ID NO: 7639 - RNA, 22 nt, Artificial Sequence
  LDLR targeting guide sequence portion
agagguaaacacguugacuccu

SEQ ID NO: 7640 - RNA, 22 nt, Artificial Sequence
  LDLR targeting guide sequence portion
agaguuguacacuguguacauu

SEQ ID NO: 7641 - RNA, 22 nt, Artificial Sequence
  LDLR targeting guide sequence portion
agauaguggggauuuuuuguua

SEQ ID NO: 7642 - RNA, 22 nt, Artificial Sequence
  LDLR targeting guide sequence portion
agaucauuuccgacgccaugaa

SEQ ID NO: 7643 - RNA, 22 nt, Artificial Sequence
  LDLR targeting guide sequence portion
agaucccaucucuacaaaaacc

SEQ ID NO: 7644 - RNA, 22 nt, Artificial Sequence
  LDLR targeting guide sequence portion
agaugaaaggggaggggauguc

SEQ ID NO: 7645 - RNA, 22 nt, Artificial Sequence
  LDLR targeting guide sequence portion
agaugaagacccuauuucagaa

SEQ ID NO: 7646 - RNA, 22 nt, Artificial Sequence
  LDLR targeting guide sequence portion
agauggcaccaacgggaccccc

SEQ ID NO: 7647 - RNA, 22 nt, Artificial Sequence
  LDLR targeting guide sequence portion
agaugggaucucgcuuuguugc

SEQ ID NO: 7648 - RNA, 22 nt, Artificial Sequence
  LDLR targeting guide sequence portion
agaugggugucacuuuuuaaac

SEQ ID NO: 7649 - RNA, 22 nt, Artificial Sequence
  LDLR targeting guide sequence portion
agauggucagucuggaggauga

SEQ ID NO: 7650 - RNA, 22 nt, Artificial Sequence
  LDLR targeting guide sequence portion
agaugucacaagggauuggcaa

SEQ ID NO: 7651 - RNA, 22 nt, Artificial Sequence
  LDLR targeting guide sequence portion
agauguucacgccacgucaucc

SEQ ID NO: 7652 - RNA, 22 nt, Artificial Sequence
  LDLR targeting guide sequence portion
agauuauuugcacgaacuggac

SEQ ID NO: 7653 - RNA, 22 nt, Artificial Sequence
  LDLR targeting guide sequence portion
agauuggggaagugaauggcuu

SEQ ID NO: 7654 - RNA, 22 nt, Artificial Sequence
  LDLR targeting guide sequence portion
agauugguggaugaggcagggc

SEQ ID NO: 7655 - RNA, 22 nt, Artificial Sequence
  LDLR targeting guide sequence portion
agcaaccaggguuugcaaaaau

SEQ ID NO: 7656 - RNA, 22 nt, Artificial Sequence
  LDLR targeting guide sequence portion
agcaaggcuugcauagaagagg

SEQ ID NO: 7657 - RNA, 22 nt, Artificial Sequence
  LDLR targeting guide sequence portion
agcaaguggcuuucaacacaca

SEQ ID NO: 7658 - RNA, 22 nt, Artificial Sequence
  LDLR targeting guide sequence portion
agcacguaaaugcgucccugua

SEQ ID NO: 7659 - RNA, 22 nt, Artificial Sequence
  LDLR targeting guide sequence portion
agcacuaggugggcggacauaa

SEQ ID NO: 7660 - RNA, 22 nt, Artificial Sequence
  LDLR targeting guide sequence portion
agcacuuugggaggcugagcug

SEQ ID NO: 7661 - RNA, 22 nt, Artificial Sequence
  LDLR targeting guide sequence portion
agcagauggcaccaacgggacc

SEQ ID NO: 7662 - RNA, 22 nt, Artificial Sequence
  LDLR targeting guide sequence portion
agcagcccauggccucuggcca

SEQ ID NO: 7663 - RNA, 22 nt, Artificial Sequence
  LDLR targeting guide sequence portion
agcaguggcauaaucauagcuc

SEQ ID NO: 7664 - RNA, 22 nt, Artificial Sequence
  LDLR targeting guide sequence portion
agcauugccugccagagcuuug

SEQ ID NO: 7665 - RNA, 22 nt, Artificial Sequence
  LDLR targeting guide sequence portion
agccaaaccccuaaacucagga

SEQ ID NO: 7666 - RNA, 22 nt, Artificial Sequence
  LDLR targeting guide sequence portion
agccacaccugggugcaggcca

SEQ ID NO: 7667 - RNA, 22 nt, Artificial Sequence
  LDLR targeting guide sequence portion
agccacucauacauacaacggg

SEQ ID NO: 7668 - RNA, 22 nt, Artificial Sequence
  LDLR targeting guide sequence portion
agccacugcgcccggccucacc

SEQ ID NO: 7669 - RNA, 22 nt, Artificial Sequence
  LDLR targeting guide sequence portion
agccacuugcuucucugggccu

SEQ ID NO: 7670 - RNA, 22 nt, Artificial Sequence
  LDLR targeting guide sequence portion
agccagaucauuuccgacgcca

SEQ ID NO: 7671 - RNA, 22 nt, Artificial Sequence
  LDLR targeting guide sequence portion
agccaggaaagggauucauggc

SEQ ID NO: 7672 - RNA, 22 nt, Artificial Sequence
  LDLR targeting guide sequence portion
agccagguuagccuuugcccug

SEQ ID NO: 7673 - RNA, 22 nt, Artificial Sequence
  LDLR targeting guide sequence portion
agccauucacuuccccaaucuu

SEQ ID NO: 7674 - RNA, 22 nt, Artificial Sequence
  LDLR targeting guide sequence portion
agccauugcaugggcacugucc

SEQ ID NO: 7675 - RNA, 22 nt, Artificial Sequence
  LDLR targeting guide sequence portion
agcccauggccucuggccaggc

SEQ ID NO: 7676 - RNA, 22 nt, Artificial Sequence
  LDLR targeting guide sequence portion
agcccgugucaaugaaugccgg

SEQ ID NO: 7677 - RNA, 22 nt, Artificial Sequence
  LDLR targeting guide sequence portion
agccgugaucgugaauaucgag

SEQ ID NO: 7678 - RNA, 22 nt, Artificial Sequence
  LDLR targeting guide sequence portion
agccucaaaugccugagcucaa

SEQ ID NO: 7679 - RNA, 22 nt, Artificial Sequence
  LDLR targeting guide sequence portion
agccuccgucagacucccgcgu

SEQ ID NO: 7680 - RNA, 22 nt, Artificial Sequence
  LDLR targeting guide sequence portion
agccucgccaugccuggccaga

SEQ ID NO: 7681 - RNA, 22 nt, Artificial Sequence
  LDLR targeting guide sequence portion
agccugaaugucuuacugugau

SEQ ID NO: 7682 - RNA, 22 nt, Artificial Sequence
  LDLR targeting guide sequence portion
agccugagucacuggucacccu

SEQ ID NO: 7683 - RNA, 22 nt, Artificial Sequence
  LDLR targeting guide sequence portion
agccuggugcccauccucccga

SEQ ID NO: 7684 - RNA, 22 nt, Artificial Sequence
  LDLR targeting guide sequence portion
agccuguucugccucccagaug

SEQ ID NO: 7685 - RNA, 22 nt, Artificial Sequence
  LDLR targeting guide sequence portion
agccuugcuagacagccagguu

SEQ ID NO: 7686 - RNA, 22 nt, Artificial Sequence
  LDLR targeting guide sequence portion
agccuuucugguuucggagcac

SEQ ID NO: 7687 - RNA, 22 nt, Artificial Sequence
  LDLR targeting guide sequence portion
agccuuugcccugucacccccg

SEQ ID NO: 7688 - RNA, 22 nt, Artificial Sequence
  LDLR targeting guide sequence portion
agcgagaucccaucucuacaaa

SEQ ID NO: 7689 - RNA, 22 nt, Artificial Sequence
  LDLR targeting guide sequence portion
agcguugcacacaguccaguuc

SEQ ID NO: 7690 - RNA, 22 nt, Artificial Sequence
  LDLR targeting guide sequence portion
agcuaugauuaugccacugcuu

SEQ ID NO: 7691 - RNA, 22 nt, Artificial Sequence
  LDLR targeting guide sequence portion
agcucacgacagccucaaaugc

SEQ ID NO: 7692 - RNA, 22 nt, Artificial Sequence
  LDLR targeting guide sequence portion
agcucaggcauuugaggcuguc

SEQ ID NO: 7693 - RNA, 22 nt, Artificial Sequence
  LDLR targeting guide sequence portion
agcucuggcaggcaaugcuuug

SEQ ID NO: 7694 - RNA, 22 nt, Artificial Sequence
  LDLR targeting guide sequence portion
agcuggaucacuugaguucagg

SEQ ID NO: 7695 - RNA, 22 nt, Artificial Sequence
  LDLR targeting guide sequence portion
agcuggguacgguggcacgugc

SEQ ID NO: 7696 - RNA, 22 nt, Artificial Sequence
  LDLR targeting guide sequence portion
aggaaaggaagaaaccaaaauc

SEQ ID NO: 7697 - RNA, 22 nt, Artificial Sequence
  LDLR targeting guide sequence portion
aggaaagggauucauggcgucg

SEQ ID NO: 7698 - RNA, 22 nt, Artificial Sequence
  LDLR targeting guide sequence portion
aggaagaaaccaaaaucccaac

SEQ ID NO: 7699 - RNA, 22 nt, Artificial Sequence
  LDLR targeting guide sequence portion
aggaaggguucugggcagggac

SEQ ID NO: 7700 - RNA, 22 nt, Artificial Sequence
  LDLR targeting guide sequence portion
aggaagguacaaacccaccucg

SEQ ID NO: 7701 - RNA, 22 nt, Artificial Sequence
  LDLR targeting guide sequence portion
aggaaguuuugaguuucucucc

SEQ ID NO: 7702 - RNA, 22 nt, Artificial Sequence
  LDLR targeting guide sequence portion
aggacaccagccuggugcccau

SEQ ID NO: 7703 - RNA, 22 nt, Artificial Sequence
  LDLR targeting guide sequence portion
aggacacguggccugcacccag

SEQ ID NO: 7704 - RNA, 22 nt, Artificial Sequence
  LDLR targeting guide sequence portion
aggagaccacgggaauggaagu

SEQ ID NO: 7705 - RNA, 22 nt, Artificial Sequence
  LDLR targeting guide sequence portion
aggagucaacguguuuaccucu

SEQ ID NO: 7706 - RNA, 22 nt, Artificial Sequence
  LDLR targeting guide sequence portion
aggaguuggagaccaggccuga

SEQ ID NO: 7707 - RNA, 22 nt, Artificial Sequence
  LDLR targeting guide sequence portion
aggauaagagaaacaggcccgg

SEQ ID NO: 7708 - RNA, 22 nt, Artificial Sequence
  LDLR targeting guide sequence portion
aggaugacaccuccauuucucu

SEQ ID NO: 7709 - RNA, 22 nt, Artificial Sequence
  LDLR targeting guide sequence portion
aggaugacguggcgugaacauc

SEQ ID NO: 7710 - RNA, 22 nt, Artificial Sequence
  LDLR targeting guide sequence portion
aggaugggcaccaggcuggugu

SEQ ID NO: 7711 - RNA, 22 nt, Artificial Sequence
  LDLR targeting guide sequence portion
aggaugguuugagcucaggcau

SEQ ID NO: 7712 - RNA, 22 nt, Artificial Sequence
  LDLR targeting guide sequence portion
aggauugugucacgguggagag

SEQ ID NO: 7713 - RNA, 22 nt, Artificial Sequence
  LDLR targeting guide sequence portion
aggcaauaacccccuacacagg

SEQ ID NO: 7714 - RNA, 22 nt, Artificial Sequence
  LDLR targeting guide sequence portion
aggcaaugcuuuggucuucucu

SEQ ID NO: 7715 - RNA, 22 nt, Artificial Sequence
  LDLR targeting guide sequence portion
aggcaccugugucuggccaaau

SEQ ID NO: 7716 - RNA, 22 nt, Artificial Sequence
  LDLR targeting guide sequence portion
aggcacgugccaccguacccag

SEQ ID NO: 7717 - RNA, 22 nt, Artificial Sequence
  LDLR targeting guide sequence portion
aggcacuuaauaaauauuaagg

SEQ ID NO: 7718 - RNA, 22 nt, Artificial Sequence
  LDLR targeting guide sequence portion
aggcagaacaggcuucggacag

SEQ ID NO: 7719 - RNA, 22 nt, Artificial Sequence
  LDLR targeting guide sequence portion
aggcagagccugagucacuggu

SEQ ID NO: 7720 - RNA, 22 nt, Artificial Sequence
  LDLR targeting guide sequence portion
aggcagauguucacgccacguc

SEQ ID NO: 7721 - RNA, 22 nt, Artificial Sequence
  LDLR targeting guide sequence portion
aggcagggccagggggucccgu

SEQ ID NO: 7722 - RNA, 22 nt, Artificial Sequence
  LDLR targeting guide sequence portion
aggcauggcgaggcugaggugg

SEQ ID NO: 7723 - RNA, 22 nt, Artificial Sequence
  LDLR targeting guide sequence portion
aggcauuucagaggcaauaacc

SEQ ID NO: 7724 - RNA, 22 nt, Artificial Sequence
  LDLR targeting guide sequence portion
aggcauuugaggcugucgugag

SEQ ID NO: 7725 - RNA, 22 nt, Artificial Sequence
  LDLR targeting guide sequence portion
aggcauuugcauagaaguggaa

SEQ ID NO: 7726 - RNA, 22 nt, Artificial Sequence
  LDLR targeting guide sequence portion
aggccacguguccucacggcca

SEQ ID NO: 7727 - RNA, 22 nt, Artificial Sequence
  LDLR targeting guide sequence portion
aggccaugggcugcugaugcac

SEQ ID NO: 7728 - RNA, 22 nt, Artificial Sequence
  LDLR targeting guide sequence portion
aggcccagagaagcaaguggcu

SEQ ID NO: 7729 - RNA, 22 nt, Artificial Sequence
  LDLR targeting guide sequence portion
aggcccggggggaccaggauga

SEQ ID NO: 7730 - RNA, 22 nt, Artificial Sequence
  LDLR targeting guide sequence portion
aggccggcgaggucucaggaag

SEQ ID NO: 7731 - RNA, 22 nt, Artificial Sequence
  LDLR targeting guide sequence portion
aggccugagcaacaaagcgaga

SEQ ID NO: 7732 - RNA, 22 nt, Artificial Sequence
  LDLR targeting guide sequence portion
aggccuggucuccaacuccuga

SEQ ID NO: 7733 - RNA, 22 nt, Artificial Sequence
  LDLR targeting guide sequence portion
aggcgugaggcaccugugucug

SEQ ID NO: 7734 - RNA, 22 nt, Artificial Sequence
  LDLR targeting guide sequence portion
aggcuaaccuggcugucuagca

SEQ ID NO: 7735 - RNA, 22 nt, Artificial Sequence
  LDLR targeting guide sequence portion
aggcuacaaaaaccuucuauac

SEQ ID NO: 7736 - RNA, 22 nt, Artificial Sequence
  LDLR targeting guide sequence portion
aggcucugccucugggaagugg

SEQ ID NO: 7737 - RNA, 22 nt, Artificial Sequence
  LDLR targeting guide sequence portion
aggcugagcuggaucacuugag

SEQ ID NO: 7738 - RNA, 22 nt, Artificial Sequence
  LDLR targeting guide sequence portion
aggcuggaaagcaguggcauaa

SEQ ID NO: 7739 - RNA, 22 nt, Artificial Sequence
  LDLR targeting guide sequence portion
aggcugguguccugacagccac

SEQ ID NO: 7740 - RNA, 22 nt, Artificial Sequence
  LDLR targeting guide sequence portion
aggcugucacugucucuccgga

SEQ ID NO: 7741 - RNA, 22 nt, Artificial Sequence
  LDLR targeting guide sequence portion
aggcuuaucacgguucccugca

SEQ ID NO: 7742 - RNA, 22 nt, Artificial Sequence
  LDLR targeting guide sequence portion
aggcuucggacagugcccaugc

SEQ ID NO: 7743 - RNA, 22 nt, Artificial Sequence
  LDLR targeting guide sequence portion
aggcuugcauagaagagguaaa

SEQ ID NO: 7744 - RNA, 22 nt, Artificial Sequence
  LDLR targeting guide sequence portion
agggaaagcccgugucaaugaa

SEQ ID NO: 7745 - RNA, 22 nt, Artificial Sequence
  LDLR targeting guide sequence portion
agggaaccgugauaagccuuuc

SEQ ID NO: 7746 - RNA, 22 nt, Artificial Sequence
  LDLR targeting guide sequence portion
agggacgcauuuacgugcuccg

SEQ ID NO: 7747 - RNA, 22 nt, Artificial Sequence
  LDLR targeting guide sequence portion
agggacgggacuccaggcagau

SEQ ID NO: 7748 - RNA, 22 nt, Artificial Sequence
  LDLR targeting guide sequence portion
agggauucauggcgucggaaau

SEQ ID NO: 7749 - RNA, 22 nt, Artificial Sequence
  LDLR targeting guide sequence portion
agggauuggcaauuguccccag

SEQ ID NO: 7750 - RNA, 22 nt, Artificial Sequence
  LDLR targeting guide sequence portion
agggcaaaggcuaaccuggcug

SEQ ID NO: 7751 - RNA, 22 nt, Artificial Sequence
  LDLR targeting guide sequence portion
agggccagggggucccguuggu

SEQ ID NO: 7752 - RNA, 22 nt, Artificial Sequence
  LDLR targeting guide sequence portion
agggccccgagaauagucacug

SEQ ID NO: 7753 - RNA, 22 nt, Artificial Sequence
  LDLR targeting guide sequence portion
aggggaggggaugucaggccca

SEQ ID NO: 7754 - RNA, 22 nt, Artificial Sequence
  LDLR targeting guide sequence portion
aggggaugucaggcccagagaa

SEQ ID NO: 7755 - RNA, 22 nt, Artificial Sequence
  LDLR targeting guide sequence portion
aggggcagguugaccgggacuu

SEQ ID NO: 7756 - RNA, 22 nt, Artificial Sequence
  LDLR targeting guide sequence portion
agggggucccguuggugccauc

SEQ ID NO: 7757 - RNA, 22 nt, Artificial Sequence
  LDLR targeting guide sequence portion
aggggguuauugccucugaaau

SEQ ID NO: 7758 - RNA, 22 nt, Artificial Sequence
  LDLR targeting guide sequence portion
aggggucgggaggaugggcacc

SEQ ID NO: 7759 - RNA, 22 nt, Artificial Sequence
  LDLR targeting guide sequence portion
agggguuuggcuuagagauugg

SEQ ID NO: 7760 - RNA, 22 nt, Artificial Sequence
  LDLR targeting guide sequence portion
agggugaccagugacucaggcu

SEQ ID NO: 7761 - RNA, 22 nt, Artificial Sequence
  LDLR targeting guide sequence portion
aggguucugggcagggacggga

SEQ ID NO: 7762 - RNA, 22 nt, Artificial Sequence
  LDLR targeting guide sequence portion
agguaaacacguugacuccuga

SEQ ID NO: 7763 - RNA, 22 nt, Artificial Sequence
  LDLR targeting guide sequence portion
agguaaccgggugucucaggca

SEQ ID NO: 7764 - RNA, 22 nt, Artificial Sequence
  LDLR targeting guide sequence portion
agguacaaacccaccucgaaag

SEQ ID NO: 7765 - RNA, 22 nt, Artificial Sequence
  LDLR targeting guide sequence portion
aggucucaggaaggguucuggg

SEQ ID NO: 7766 - RNA, 22 nt, Artificial Sequence
  LDLR targeting guide sequence portion
aggugggaggaugguuugagcu

SEQ ID NO: 7767 - RNA, 22 nt, Artificial Sequence
  LDLR targeting guide sequence portion
aggugggcggacauaaagacga

SEQ ID NO: 7768 - RNA, 22 nt, Artificial Sequence
  LDLR targeting guide sequence portion
agguggguuuguaccuuccuua

SEQ ID NO: 7769 - RNA, 22 nt, Artificial Sequence
  LDLR targeting guide sequence portion
aggugucauccugguccccccg

SEQ ID NO: 7770 - RNA, 22 nt, Artificial Sequence
  LDLR targeting guide sequence portion
agguguggcugucaggacacca

SEQ ID NO: 7771 - RNA, 22 nt, Artificial Sequence
  LDLR targeting guide sequence portion
agguuagccuuugcccugucac

SEQ ID NO: 7772 - RNA, 22 nt, Artificial Sequence
  LDLR targeting guide sequence portion
agguucuuucugaaaucgccgu

SEQ ID NO: 7773 - RNA, 22 nt, Artificial Sequence
  LDLR targeting guide sequence portion
agguugaccgggacuucaaagc

SEQ ID NO: 7774 - RNA, 22 nt, Artificial Sequence
  LDLR targeting guide sequence portion
agguuuuuguagccugaauguc

SEQ ID NO: 7775 - RNA, 22 nt, Artificial Sequence
  LDLR targeting guide sequence portion
aguaacacggcgauuucagaaa

SEQ ID NO: 7776 - RNA, 22 nt, Artificial Sequence
  LDLR targeting guide sequence portion
aguaagacauucaggcuacaaa

SEQ ID NO: 7777 - RNA, 22 nt, Artificial Sequence
  LDLR targeting guide sequence portion
aguaagaccccaucucuuaaaa

SEQ ID NO: 7778 - RNA, 22 nt, Artificial Sequence
  LDLR targeting guide sequence portion
agucaacguguuuaccucuucu

SEQ ID NO: 7779 - RNA, 22 nt, Artificial Sequence
  LDLR targeting guide sequence portion
agucacugaacaaauacagcaa

SEQ ID NO: 7780 - RNA, 22 nt, Artificial Sequence
  LDLR targeting guide sequence portion
agucacuggucacccuuaauau

SEQ ID NO: 7781 - RNA, 22 nt, Artificial Sequence
  LDLR targeting guide sequence portion
aguccaguucgugcaaauaauc

SEQ ID NO: 7782 - RNA, 22 nt, Artificial Sequence
  LDLR targeting guide sequence portion
agucccggucaaccugccccuc

SEQ ID NO: 7783 - RNA, 22 nt, Artificial Sequence
  LDLR targeting guide sequence portion
agucccgucaaacgauccagac

SEQ ID NO: 7784 - RNA, 22 nt, Artificial Sequence
  LDLR targeting guide sequence portion
agucccgucccugcccagaacc

SEQ ID NO: 7785 - RNA, 22 nt, Artificial Sequence
  LDLR targeting guide sequence portion
agucugacggaggcugucacug

SEQ ID NO: 7786 - RNA, 22 nt, Artificial Sequence
  LDLR targeting guide sequence portion
agucuggaggaugacguggcgu

SEQ ID NO: 7787 - RNA, 22 nt, Artificial Sequence
  LDLR targeting guide sequence portion
agucuggaucguuugacgggac

SEQ ID NO: 7788 - RNA, 22 nt, Artificial Sequence
  LDLR targeting guide sequence portion
agugaauggcuuggaggcauuu

SEQ ID NO: 7789 - RNA, 22 nt, Artificial Sequence
  LDLR targeting guide sequence portion
agugacacccaucucccagaag

SEQ ID NO: 7790 - RNA, 22 nt, Artificial Sequence
  LDLR targeting guide sequence portion
agugacagccuccgucagacuc

SEQ ID NO: 7791 - RNA, 22 nt, Artificial Sequence
  LDLR targeting guide sequence portion
agugacuauucucggggcccug

SEQ ID NO: 7792 - RNA, 22 nt, Artificial Sequence
  LDLR targeting guide sequence portion
agugacucaggcucugccucug

SEQ ID NO: 7793 - RNA, 22 nt, Artificial Sequence
  LDLR targeting guide sequence portion
agugauccagcucagccuccca

SEQ ID NO: 7794 - RNA, 22 nt, Artificial Sequence
  LDLR targeting guide sequence portion
agugcaaacauaacaaaaaauc

SEQ ID NO: 7795 - RNA, 22 nt, Artificial Sequence
  LDLR targeting guide sequence portion
agugcaacaguaacacggcgau

SEQ ID NO: 7796 - RNA, 22 nt, Artificial Sequence
  LDLR targeting guide sequence portion
agugcaaggagaccacgggaau

SEQ ID NO: 7797 - RNA, 22 nt, Artificial Sequence
  LDLR targeting guide sequence portion
agugcagggaaccgugauaagc

SEQ ID NO: 7798 - RNA, 22 nt, Artificial Sequence
  LDLR targeting guide sequence portion
agugcccaugcaauggcuuggg

SEQ ID NO: 7799 - RNA, 22 nt, Artificial Sequence
  LDLR targeting guide sequence portion
agugccugagacacccgguuac

SEQ ID NO: 7800 - RNA, 22 nt, Artificial Sequence
  LDLR targeting guide sequence portion
agugcuuccacuucuaugcaaa

SEQ ID NO: 7801 - RNA, 22 nt, Artificial Sequence
  LDLR targeting guide sequence portion
aguggaagcacuaggugggcgg

SEQ ID NO: 7802 - RNA, 22 nt, Artificial Sequence
  LDLR targeting guide sequence portion
aguggcaucauuuggugaauga

SEQ ID NO: 7803 - RNA, 22 nt, Artificial Sequence
  LDLR targeting guide sequence portion
aguggcuucugggagaugggug

SEQ ID NO: 7804 - RNA, 22 nt, Artificial Sequence
  LDLR targeting guide sequence portion
aguggcuuucaacacacaacag

SEQ ID NO: 7805 - RNA, 22 nt, Artificial Sequence
  LDLR targeting guide sequence portion
aguggggauuuuuuguuauguu

SEQ ID NO: 7806 - RNA, 22 nt, Artificial Sequence
  LDLR targeting guide sequence portion
aguggguaggggucgggaggau

SEQ ID NO: 7807 - RNA, 22 nt, Artificial Sequence
  LDLR targeting guide sequence portion
agugguuuaaaaagugacaccc

SEQ ID NO: 7808 - RNA, 22 nt, Artificial Sequence
  LDLR targeting guide sequence portion
aguguacaacucugaacugaga

SEQ ID NO: 7809 - RNA, 22 nt, Artificial Sequence
  LDLR targeting guide sequence portion
agugucuuucgagguggguuug

SEQ ID NO: 7810 - RNA, 22 nt, Artificial Sequence
  LDLR targeting guide sequence portion
aguguuuugucccuggggacaa

SEQ ID NO: 7811 - RNA, 22 nt, Artificial Sequence
  LDLR targeting guide sequence portion
aguuaaaaaucagcuggguacg

SEQ ID NO: 7812 - RNA, 22 nt, Artificial Sequence
  LDLR targeting guide sequence portion
aguucagaguuguacacugugu

SEQ ID NO: 7813 - RNA, 22 nt, Artificial Sequence
  LDLR targeting guide sequence portion
aguucaggaguuggagaccagg

SEQ ID NO: 7814 - RNA, 22 nt, Artificial Sequence
  LDLR targeting guide sequence portion
aguucucgauauucacgaucac

SEQ ID NO: 7815 - RNA, 22 nt, Artificial Sequence
  LDLR targeting guide sequence portion
aguuggagaccaggccugagca

SEQ ID NO: 7816 - RNA, 22 nt, Artificial Sequence
  LDLR targeting guide sequence portion
aguuguacacuguguacauuug

SEQ ID NO: 7817 - RNA, 22 nt, Artificial Sequence
  LDLR targeting guide sequence portion
aguuguauuucugaaauagggu

SEQ ID NO: 7818 - RNA, 22 nt, Artificial Sequence
  LDLR targeting guide sequence portion
aguuuagggguuuggcuuagag

SEQ ID NO: 7819 - RNA, 22 nt, Artificial Sequence
  LDLR targeting guide sequence portion
aguuucaaccaauauacaaagu

SEQ ID NO: 7820 - RNA, 22 nt, Artificial Sequence
  LDLR targeting guide sequence portion
aguuucucuccaccgugacaca

SEQ ID NO: 7821 - RNA, 22 nt, Artificial Sequence
  LDLR targeting guide sequence portion
aguuuggucucggugccaccac

SEQ ID NO: 7822 - RNA, 22 nt, Artificial Sequence
  LDLR targeting guide sequence portion
aguuuugaguuucucuccaccg

SEQ ID NO: 7823 - RNA, 22 nt, Artificial Sequence
  LDLR targeting guide sequence portion
auaaaacaaagcucuggcaggc

SEQ ID NO: 7824 - RNA, 22 nt, Artificial Sequence
  LDLR targeting guide sequence portion
auaaaacaaggccggcgagguc

SEQ ID NO: 7825 - RNA, 22 nt, Artificial Sequence
  LDLR targeting guide sequence portion
auaaagaagaggcauuucagag

SEQ ID NO: 7826 - RNA, 22 nt, Artificial Sequence
  LDLR targeting guide sequence portion
auaaagacgacaauggcaguuc

SEQ ID NO: 7827 - RNA, 22 nt, Artificial Sequence
  LDLR targeting guide sequence portion
auaaauaaauccuccagucugg

SEQ ID NO: 7828 - RNA, 22 nt, Artificial Sequence
  LDLR targeting guide sequence portion
auaaauauuaagggugaccagu

SEQ ID NO: 7829 - RNA, 22 nt, Artificial Sequence
  LDLR targeting guide sequence portion
auaaauccuccagucuggaucg

SEQ ID NO: 7830 - RNA, 22 nt, Artificial Sequence
  LDLR targeting guide sequence portion
auaacaaaaaauccccacuauc

SEQ ID NO: 7831 - RNA, 22 nt, Artificial Sequence
  LDLR targeting guide sequence portion
auaacacaaaugccaaauguac

SEQ ID NO: 7832 - RNA, 22 nt, Artificial Sequence
  LDLR targeting guide sequence portion
auaacccccuacacagggcccc

SEQ ID NO: 7833 - RNA, 22 nt, Artificial Sequence
  LDLR targeting guide sequence portion
auaagagaaacaggcccggggg

SEQ ID NO: 7834 - RNA, 22 nt, Artificial Sequence
  LDLR targeting guide sequence portion
auaagccuuucugguuucggag

SEQ ID NO: 7835 - RNA, 22 nt, Artificial Sequence
  LDLR targeting guide sequence portion
auaaucauagcucacgacagcc

SEQ ID NO: 7836 - RNA, 22 nt, Artificial Sequence
  LDLR targeting guide sequence portion
auacaacggggacaucauucuc

SEQ ID NO: 7837 - RNA, 22 nt, Artificial Sequence
  LDLR targeting guide sequence portion
auacagcaaccaggguuugcaa

SEQ ID NO: 7838 - RNA, 22 nt, Artificial Sequence
  LDLR targeting guide sequence portion
auacagugguuuaaaaagugac

SEQ ID NO: 7839 - RNA, 22 nt, Artificial Sequence
  LDLR targeting guide sequence portion
auacauacaacggggacaucau

SEQ ID NO: 7840 - RNA, 22 nt, Artificial Sequence
  LDLR targeting guide sequence portion
auacccaucaacgacaagauug

SEQ ID NO: 7841 - RNA, 22 nt, Artificial Sequence
  LDLR targeting guide sequence portion
auagaagagguaaacacguuga

SEQ ID NO: 7842 - RNA, 22 nt, Artificial Sequence
  LDLR targeting guide sequence portion
auagaagguuuuuguagccuga

SEQ ID NO: 7843 - RNA, 22 nt, Artificial Sequence
  LDLR targeting guide sequence portion
auagaaguggaagcacuaggug

SEQ ID NO: 7844 - RNA, 22 nt, Artificial Sequence
  LDLR targeting guide sequence portion
auagcucacgacagccucaaau

SEQ ID NO: 7845 - RNA, 22 nt, Artificial Sequence
  LDLR targeting guide sequence portion
auaguaagaccccaucucuuaa

SEQ ID NO: 7846 - RNA, 22 nt, Artificial Sequence
  LDLR targeting guide sequence portion
auagucacugaacaaauacagc

SEQ ID NO: 7847 - RNA, 22 nt, Artificial Sequence
  LDLR targeting guide sequence portion
auaguggggauuuuuuguuaug

SEQ ID NO: 7848 - RNA, 22 nt, Artificial Sequence
  LDLR targeting guide sequence portion
auaguuguauuucugaaauagg

SEQ ID NO: 7849 - RNA, 22 nt, Artificial Sequence
  LDLR targeting guide sequence portion
auauaaaacaaagcucuggcag

SEQ ID NO: 7850 - RNA, 22 nt, Artificial Sequence
  LDLR targeting guide sequence portion
auauauaaaacaaagcucuggc

SEQ ID NO: 7851 - RNA, 22 nt, Artificial Sequence
  LDLR targeting guide sequence portion
auauauuuauucaucugggagg

SEQ ID NO: 7852 - RNA, 22 nt, Artificial Sequence
  LDLR targeting guide sequence portion
auaucgagaacugccauugucg

SEQ ID NO: 7853 - RNA, 22 nt, Artificial Sequence
  LDLR targeting guide sequence portion
auauuaagggugaccagugacu

SEQ ID NO: 7854 - RNA, 22 nt, Artificial Sequence
  LDLR targeting guide sequence portion
auauucacgaucacggcuuuga

SEQ ID NO: 7855 - RNA, 22 nt, Artificial Sequence
  LDLR targeting guide sequence portion
auauuuauuaagugccugagac

SEQ ID NO: 7856 - RNA, 22 nt, Artificial Sequence
  LDLR targeting guide sequence portion
auauuuauucaucugggaggca

SEQ ID NO: 7857 - RNA, 22 nt, Artificial Sequence
  LDLR targeting guide sequence portion
aucaacgacaagauuggggaag

SEQ ID NO: 7858 - RNA, 22 nt, Artificial Sequence
  LDLR targeting guide sequence portion
aucacaggcacgugccaccgua

SEQ ID NO: 7859 - RNA, 22 nt, Artificial Sequence
  LDLR targeting guide sequence portion
aucacaguaagacauucaggcu

SEQ ID NO: 7860 - RNA, 22 nt, Artificial Sequence
  LDLR targeting guide sequence portion
aucacggcuuugaagucccggu

SEQ ID NO: 7861 - RNA, 22 nt, Artificial Sequence
  LDLR targeting guide sequence portion
aucagcagcccauggccucugg

SEQ ID NO: 7862 - RNA, 22 nt, Artificial Sequence
  LDLR targeting guide sequence portion
aucagcuggguacgguggcacg

SEQ ID NO: 7863 - RNA, 22 nt, Artificial Sequence
  LDLR targeting guide sequence portion
aucagugcaacaguaacacggc

SEQ ID NO: 7864 - RNA, 22 nt, Artificial Sequence
  LDLR targeting guide sequence portion
aucauagcucacgacagccuca

SEQ ID NO: 7865 - RNA, 22 nt, Artificial Sequence
  LDLR targeting guide sequence portion
aucaugacccacccagugucuu

SEQ ID NO: 7866 - RNA, 22 nt, Artificial Sequence
  LDLR targeting guide sequence portion
aucauucucccaaaaagcguug

SEQ ID NO: 7867 - RNA, 22 nt, Artificial Sequence
  LDLR targeting guide sequence portion
aucauuuccgacgccaugaauc

SEQ ID NO: 7868 - RNA, 22 nt, Artificial Sequence
  LDLR targeting guide sequence portion
aucauuuggugaaugaguuugg

SEQ ID NO: 7869 - RNA, 22 nt, Artificial Sequence
  LDLR targeting guide sequence portion
auccaccaaucucuaagccaaa

SEQ ID NO: 7870 - RNA, 22 nt, Artificial Sequence
  LDLR targeting guide sequence portion
aucccaacacacacgacagaaa

SEQ ID NO: 7871 - RNA, 22 nt, Artificial Sequence
  LDLR targeting guide sequence portion
aucccaacccaagccauugcau

SEQ ID NO: 7872 - RNA, 22 nt, Artificial Sequence
  LDLR targeting guide sequence portion
aucccaggccagggaaagcccg

SEQ ID NO: 7873 - RNA, 22 nt, Artificial Sequence
  LDLR targeting guide sequence portion
aucccaucucuacaaaaaccaa

SEQ ID NO: 7874 - RNA, 22 nt, Artificial Sequence
  LDLR targeting guide sequence portion
auccccacuaucuguacaggga

SEQ ID NO: 7875 - RNA, 22 nt, Artificial Sequence
  LDLR targeting guide sequence portion
auccccuccccuuucaucuucc

SEQ ID NO: 7876 - RNA, 22 nt, Artificial Sequence
  LDLR targeting guide sequence portion
aucccuugugacaucuucacgc

SEQ ID NO: 7877 - RNA, 22 nt, Artificial Sequence
  LDLR targeting guide sequence portion
aucccuuuccuggcuuaaggaa

SEQ ID NO: 7878 - RNA, 22 nt, Artificial Sequence
  LDLR targeting guide sequence portion
auccgugguggcaccgagacca

SEQ ID NO: 7879 - RNA, 22 nt, Artificial Sequence
  LDLR targeting guide sequence portion
auccucaaacauggaagaugaa

SEQ ID NO: 7880 - RNA, 22 nt, Artificial Sequence
  LDLR targeting guide sequence portion
auccuccagucuggaucguuug

SEQ ID NO: 7881 - RNA, 22 nt, Artificial Sequence
  LDLR targeting guide sequence portion
auccucccaccucagccucgcc

SEQ ID NO: 7882 - RNA, 22 nt, Artificial Sequence
  LDLR targeting guide sequence portion
auccucccgaccccuacccacu

SEQ ID NO: 7883 - RNA, 22 nt, Artificial Sequence
  LDLR targeting guide sequence portion
auccugguccccccgggccugu

SEQ ID NO: 7884 - RNA, 22 nt, Artificial Sequence
  LDLR targeting guide sequence portion
auccuucacgaggaaaggaaga

SEQ ID NO: 7885 - RNA, 22 nt, Artificial Sequence
  LDLR targeting guide sequence portion
aucgagaacugccauugucguc

SEQ ID NO: 7886 - RNA, 22 nt, Artificial Sequence
  LDLR targeting guide sequence portion
aucgccguguuacuguugcacu

SEQ ID NO: 7887 - RNA, 22 nt, Artificial Sequence
  LDLR targeting guide sequence portion
aucgugaauaucgagaacugcc

SEQ ID NO: 7888 - RNA, 22 nt, Artificial Sequence
  LDLR targeting guide sequence portion
aucguuugacgggacuucaggu

SEQ ID NO: 7889 - RNA, 22 nt, Artificial Sequence
  LDLR targeting guide sequence portion
aucuauuuauuuuugcaaaccc

SEQ ID NO: 7890 - RNA, 22 nt, Artificial Sequence
  LDLR targeting guide sequence portion
aucucccagaagccacucauac

SEQ ID NO: 7891 - RNA, 22 nt, Artificial Sequence
  LDLR targeting guide sequence portion
aucucgcuuuguugcucaggcc

SEQ ID NO: 7892 - RNA, 22 nt, Artificial Sequence
  LDLR targeting guide sequence portion
aucucuaagccaaaccccuaaa

SEQ ID NO: 7893 - RNA, 22 nt, Artificial Sequence
  LDLR targeting guide sequence portion
aucucuuaaaaaaugaauuugg

SEQ ID NO: 7894 - RNA, 22 nt, Artificial Sequence
  LDLR targeting guide sequence portion
aucugccuggagucccgucccu

SEQ ID NO: 7895 - RNA, 22 nt, Artificial Sequence
  LDLR targeting guide sequence portion
aucugcuguuguguguugaaag

SEQ ID NO: 7896 - RNA, 22 nt, Artificial Sequence
  LDLR targeting guide sequence portion
aucuggcugaauccgugguggc

SEQ ID NO: 7897 - RNA, 22 nt, Artificial Sequence
  LDLR targeting guide sequence portion
aucugggaggcagaacaggcuu

SEQ ID NO: 7898 - RNA, 22 nt, Artificial Sequence
  LDLR targeting guide sequence portion
aucuguacagggacgcauuuac

SEQ ID NO: 7899 - RNA, 22 nt, Artificial Sequence
  LDLR targeting guide sequence portion
aucuucacgcgggagucugacg

SEQ ID NO: 7900 - RNA, 22 nt, Artificial Sequence
  LDLR targeting guide sequence portion
aucuuccauguuugaggauugu

SEQ ID NO: 7901 - RNA, 22 nt, Artificial Sequence
  LDLR targeting guide sequence portion
aucuugucguugauggguaugu

SEQ ID NO: 7902 - RNA, 22 nt, Artificial Sequence
  LDLR targeting guide sequence portion
aucuuuguacauaaagaagagg

SEQ ID NO: 7903 - RNA, 22 nt, Artificial Sequence
  LDLR targeting guide sequence portion
augaaaggggaggggaugucag

SEQ ID NO: 7904 - RNA, 22 nt, Artificial Sequence
  LDLR targeting guide sequence portion
augaagacccuauuucagaaau

SEQ ID NO: 7905 - RNA, 22 nt, Artificial Sequence
  LDLR targeting guide sequence portion
augaaucccuuuccuggcuuaa

SEQ ID NO: 7906 - RNA, 22 nt, Artificial Sequence
  LDLR targeting guide sequence portion
augaaugccggggacagagagg

SEQ ID NO: 7907 - RNA, 22 nt, Artificial Sequence
  LDLR targeting guide sequence portion
augaauuuggccagacacaggu

SEQ ID NO: 7908 - RNA, 22 nt, Artificial Sequence
  LDLR targeting guide sequence portion
augacaccuccauuucucucca

SEQ ID NO: 7909 - RNA, 22 nt, Artificial Sequence
  LDLR targeting guide sequence portion
augacccacccagugucuuucg

SEQ ID NO: 7910 - RNA, 22 nt, Artificial Sequence
  LDLR targeting guide sequence portion
augacguggcgugaacaucugc

SEQ ID NO: 7911 - RNA, 22 nt, Artificial Sequence
  LDLR targeting guide sequence portion
augaggcagggccagggggucc

SEQ ID NO: 7912 - RNA, 22 nt, Artificial Sequence
  LDLR targeting guide sequence portion
augaguggcuucugggagaugg

SEQ ID NO: 7913 - RNA, 22 nt, Artificial Sequence
  LDLR targeting guide sequence portion
augaguuuggucucggugccac

SEQ ID NO: 7914 - RNA, 22 nt, Artificial Sequence
  LDLR targeting guide sequence portion
augaucuggcugaauccguggu

SEQ ID NO: 7915 - RNA, 22 nt, Artificial Sequence
  LDLR targeting guide sequence portion
augaugccacuucccagaggca

SEQ ID NO: 7916 - RNA, 22 nt, Artificial Sequence
  LDLR targeting guide sequence portion
augauguccccguuguauguau

SEQ ID NO: 7917 - RNA, 22 nt, Artificial Sequence
  LDLR targeting guide sequence portion
augauuaugccacugcuuucca

SEQ ID NO: 7918 - RNA, 22 nt, Artificial Sequence
  LDLR targeting guide sequence portion
augauucgggggugacagggca

SEQ ID NO: 7919 - RNA, 22 nt, Artificial Sequence
  LDLR targeting guide sequence portion
augcaaaugccuccaagccauu

SEQ ID NO: 7920 - RNA, 22 nt, Artificial Sequence
  LDLR targeting guide sequence portion
augcaagccuugcuagacagcc

SEQ ID NO: 7921 - RNA, 22 nt, Artificial Sequence
  LDLR targeting guide sequence portion
augcaauggcuuggguugggau

SEQ ID NO: 7922 - RNA, 22 nt, Artificial Sequence
  LDLR targeting guide sequence portion
augcacggugaggccgggcgca

SEQ ID NO: 7923 - RNA, 22 nt, Artificial Sequence
  LDLR targeting guide sequence portion
augcauggugcaucagcagccc

SEQ ID NO: 7924 - RNA, 22 nt, Artificial Sequence
  LDLR targeting guide sequence portion
augccaaauguacacaguguac

SEQ ID NO: 7925 - RNA, 22 nt, Artificial Sequence
  LDLR targeting guide sequence portion
augccacuucccagaggcagag

SEQ ID NO: 7926 - RNA, 22 nt, Artificial Sequence
  LDLR targeting guide sequence portion
augccggggacagagaggggca

SEQ ID NO: 7927 - RNA, 22 nt, Artificial Sequence
  LDLR targeting guide sequence portion
augccuccaagccauucacuuc

SEQ ID NO: 7928 - RNA, 22 nt, Artificial Sequence
  LDLR targeting guide sequence portion
augccugagcucaaaccauccu

SEQ ID NO: 7929 - RNA, 22 nt, Artificial Sequence
  LDLR targeting guide sequence portion
augccuggccagaggccauggg

SEQ ID NO: 7930 - RNA, 22 nt, Artificial Sequence
  LDLR targeting guide sequence portion
augcgucccuguacagauagug

SEQ ID NO: 7931 - RNA, 22 nt, Artificial Sequence
  LDLR targeting guide sequence portion
augcuuuggucuucucugucuu

SEQ ID NO: 7932 - RNA, 22 nt, Artificial Sequence
  LDLR targeting guide sequence portion
auggaagaugaaaggggagggg

SEQ ID NO: 7933 - RNA, 22 nt, Artificial Sequence
  LDLR targeting guide sequence portion
auggaaguggguaggggucggg

SEQ ID NO: 7934 - RNA, 22 nt, Artificial Sequence
  LDLR targeting guide sequence portion
auggaggugucauccugguccc

SEQ ID NO: 7935 - RNA, 22 nt, Artificial Sequence
  LDLR targeting guide sequence portion
auggcaccaacgggacccccug

SEQ ID NO: 7936 - RNA, 22 nt, Artificial Sequence
  LDLR targeting guide sequence portion
auggcaguucucgauauucacg

SEQ ID NO: 7937 - RNA, 22 nt, Artificial Sequence
  LDLR targeting guide sequence portion
auggccucuggccaggcauggc

SEQ ID NO: 7938 - RNA, 22 nt, Artificial Sequence
  LDLR targeting guide sequence portion
auggcgaggcugaggugggagg

SEQ ID NO: 7939 - RNA, 22 nt, Artificial Sequence
  LDLR targeting guide sequence portion
auggcgucggaaaugaucuggc

SEQ ID NO: 7940 - RNA, 22 nt, Artificial Sequence
  LDLR targeting guide sequence portion
auggcuuggaggcauuugcaua

SEQ ID NO: 7941 - RNA, 22 nt, Artificial Sequence
  LDLR targeting guide sequence portion
auggcuuggguugggauuuugg

SEQ ID NO: 7942 - RNA, 22 nt, Artificial Sequence
  LDLR targeting guide sequence portion
augggaucccaggccagggaaa

SEQ ID NO: 7943 - RNA, 22 nt, Artificial Sequence
  LDLR targeting guide sequence portion
augggaucucgcuuuguugcuc

SEQ ID NO: 7944 - RNA, 22 nt, Artificial Sequence
  LDLR targeting guide sequence portion
augggcaccaggcugguguccu

SEQ ID NO: 7945 - RNA, 22 nt, Artificial Sequence
  LDLR targeting guide sequence portion
augggcacuguccgaagccugu

SEQ ID NO: 7946 - RNA, 22 nt, Artificial Sequence
  LDLR targeting guide sequence portion
augggcugcugaugcaccaugc

SEQ ID NO: 7947 - RNA, 22 nt, Artificial Sequence
  LDLR targeting guide sequence portion
auggguauguguuuaaaacaug

SEQ ID NO: 7948 - RNA, 22 nt, Artificial Sequence
  LDLR targeting guide sequence portion
augggugucacuuuuuaaacca

SEQ ID NO: 7949 - RNA, 22 nt, Artificial Sequence
  LDLR targeting guide sequence portion
auggucagucuggaggaugacg

SEQ ID NO: 7950 - RNA, 22 nt, Artificial Sequence
  LDLR targeting guide sequence portion
auggugcaucagcagcccaugg

SEQ ID NO: 7951 - RNA, 22 nt, Artificial Sequence
  LDLR targeting guide sequence portion
augguuugagcucaggcauuug

SEQ ID NO: 7952 - RNA, 22 nt, Artificial Sequence
  LDLR targeting guide sequence portion
auguacaaagauuauuugcacg

SEQ ID NO: 7953 - RNA, 22 nt, Artificial Sequence
  LDLR targeting guide sequence portion
auguacacaguguacaacucug

SEQ ID NO: 7954 - RNA, 22 nt, Artificial Sequence
  LDLR targeting guide sequence portion
auguaugaguggcuucugggag

SEQ ID NO: 7955 - RNA, 22 nt, Artificial Sequence
  LDLR targeting guide sequence portion
augucacaagggauuggcaauu

SEQ ID NO: 7956 - RNA, 22 nt, Artificial Sequence
  LDLR targeting guide sequence portion
augucaggcccagagaagcaag

SEQ ID NO: 7957 - RNA, 22 nt, Artificial Sequence
  LDLR targeting guide sequence portion
auguccccguuguauguaugag

SEQ ID NO: 7958 - RNA, 22 nt, Artificial Sequence
  LDLR targeting guide sequence portion
auguccgcccaccuagugcuuc

SEQ ID NO: 7959 - RNA, 22 nt, Artificial Sequence
  LDLR targeting guide sequence portion
auguccggagagacagugacag

SEQ ID NO: 7960 - RNA, 22 nt, Artificial Sequence
  LDLR targeting guide sequence portion
auguguuuaaaacaugcacggu

SEQ ID NO: 7961 - RNA, 22 nt, Artificial Sequence
  LDLR targeting guide sequence portion
auguucacgccacgucauccuc

SEQ ID NO: 7962 - RNA, 22 nt, Artificial Sequence
  LDLR targeting guide sequence portion
auguugcccaggcuggaaagca

SEQ ID NO: 7963 - RNA, 22 nt, Artificial Sequence
  LDLR targeting guide sequence portion
auguuugaggauugugucacgg

SEQ ID NO: 7964 - RNA, 22 nt, Artificial Sequence
  LDLR targeting guide sequence portion
auguuuuaaacacauacccauc

SEQ ID NO: 7965 - RNA, 22 nt, Artificial Sequence
  LDLR targeting guide sequence portion
auuaagggugaccagugacuca

SEQ ID NO: 7966 - RNA, 22 nt, Artificial Sequence
  LDLR targeting guide sequence portion
auuaagugccugagacacccgg

SEQ ID NO: 7967 - RNA, 22 nt, Artificial Sequence
  LDLR targeting guide sequence portion
auuacaggcgugaggcaccugu

SEQ ID NO: 7968 - RNA, 22 nt, Artificial Sequence
  LDLR targeting guide sequence portion
auuaugccacugcuuuccagcc

SEQ ID NO: 7969 - RNA, 22 nt, Artificial Sequence
  LDLR targeting guide sequence portion
auuauuugcacgaacuggacug

SEQ ID NO: 7970 - RNA, 22 nt, Artificial Sequence
  LDLR targeting guide sequence portion
auuauuuugcacuguuuucugu

SEQ ID NO: 7971 - RNA, 22 nt, Artificial Sequence
  LDLR targeting guide sequence portion
auucaaagacagagaagaccaa

SEQ ID NO: 7972 - RNA, 22 nt, Artificial Sequence
  LDLR targeting guide sequence portion
auucaccaaaugaugccacuuc

SEQ ID NO: 7973 - RNA, 22 nt, Artificial Sequence
  LDLR targeting guide sequence portion
auucacgaucacggcuuugaag

SEQ ID NO: 7974 - RNA, 22 nt, Artificial Sequence
  LDLR targeting guide sequence portion
auucacuuccccaaucuugucg

SEQ ID NO: 7975 - RNA, 22 nt, Artificial Sequence
  LDLR targeting guide sequence portion
auucagccagaucauuuccgac

SEQ ID NO: 7976 - RNA, 22 nt, Artificial Sequence
  LDLR targeting guide sequence portion
auucaggcuacaaaaaccuucu

SEQ ID NO: 7977 - RNA, 22 nt, Artificial Sequence
  LDLR targeting guide sequence portion
auucaucugggaggcagaacag

SEQ ID NO: 7978 - RNA, 22 nt, Artificial Sequence
  LDLR targeting guide sequence portion
auucauggcgucggaaaugauc

SEQ ID NO: 7979 - RNA, 22 nt, Artificial Sequence
  LDLR targeting guide sequence portion
auucauugacacgggcuuuccc

SEQ ID NO: 7980 - RNA, 22 nt, Artificial Sequence
  LDLR targeting guide sequence portion
auucauuuuuuaagagaugggg

SEQ ID NO: 7981 - RNA, 22 nt, Artificial Sequence
  LDLR targeting guide sequence portion
auucccguggucuccuugcacu

SEQ ID NO: 7982 - RNA, 22 nt, Artificial Sequence
  LDLR targeting guide sequence portion
auucgggggugacagggcaaag

SEQ ID NO: 7983 - RNA, 22 nt, Artificial Sequence
  LDLR targeting guide sequence portion
auucucccaaaaagcguugcac

SEQ ID NO: 7984 - RNA, 22 nt, Artificial Sequence
  LDLR targeting guide sequence portion
auucucggggcccuguguaggg

SEQ ID NO: 7985 - RNA, 22 nt, Artificial Sequence
  LDLR targeting guide sequence portion
auugacacgggcuuucccuggc

SEQ ID NO: 7986 - RNA, 22 nt, Artificial Sequence
  LDLR targeting guide sequence portion
auugaucacaguaagacauuca

SEQ ID NO: 7987 - RNA, 22 nt, Artificial Sequence
  LDLR targeting guide sequence portion
auugcaugggcacuguccgaag

SEQ ID NO: 7988 - RNA, 22 nt, Artificial Sequence
  LDLR targeting guide sequence portion
auugccaaucccuugugacauc

SEQ ID NO: 7989 - RNA, 22 nt, Artificial Sequence
  LDLR targeting guide sequence portion
auugccucugaaaugccucuuc

SEQ ID NO: 7990 - RNA, 22 nt, Artificial Sequence
  LDLR targeting guide sequence portion
auugccugccagagcuuuguuu

SEQ ID NO: 7991 - RNA, 22 nt, Artificial Sequence
  LDLR targeting guide sequence portion
auuggcaauuguccccagggac

SEQ ID NO: 7992 - RNA, 22 nt, Artificial Sequence
  LDLR targeting guide sequence portion
auuggggaagugaauggcuugg

SEQ ID NO: 7993 - RNA, 22 nt, Artificial Sequence
  LDLR targeting guide sequence portion
auugguggaugaggcagggcca

SEQ ID NO: 7994 - RNA, 22 nt, Artificial Sequence
  LDLR targeting guide sequence portion
auuguccccagggacaaaacac

SEQ ID NO: 7995 - RNA, 22 nt, Artificial Sequence
  LDLR targeting guide sequence portion
auugucgucuuuauguccgccc

SEQ ID NO: 7996 - RNA, 22 nt, Artificial Sequence
  LDLR targeting guide sequence portion
auugugucacgguggagagaaa

SEQ ID NO: 7997 - RNA, 22 nt, Artificial Sequence
  LDLR targeting guide sequence portion
auuuacgugcuccgaaaccaga

SEQ ID NO: 7998 - RNA, 22 nt, Artificial Sequence
  LDLR targeting guide sequence portion
auuuauuaagugccugagacac

SEQ ID NO: 7999 - RNA, 22 nt, Artificial Sequence
  LDLR targeting guide sequence portion
auuuauucaucugggaggcaga

SEQ ID NO: 8000 - RNA, 22 nt, Artificial Sequence
  LDLR targeting guide sequence portion
auuuauuuuugcaaacccuggu

SEQ ID NO: 8001 - RNA, 22 nt, Artificial Sequence
  LDLR targeting guide sequence portion
auuucagaaagaaccugaaguc

SEQ ID NO: 8002 - RNA, 22 nt, Artificial Sequence
  LDLR targeting guide sequence portion
auuucagaggcaauaacccccu

SEQ ID NO: 8003 - RNA, 22 nt, Artificial Sequence
  LDLR targeting guide sequence portion
auuuccgacgccaugaaucccu

SEQ ID NO: 8004 - RNA, 22 nt, Artificial Sequence
  LDLR targeting guide sequence portion
auuucucuccaggaaguuuuga

SEQ ID NO: 8005 - RNA, 22 nt, Artificial Sequence
  LDLR targeting guide sequence portion
auuucugaaauagggucuucau

SEQ ID NO: 8006 - RNA, 22 nt, Artificial Sequence
  LDLR targeting guide sequence portion
auuugaggcugucgugagcuau

SEQ ID NO: 8007 - RNA, 22 nt, Artificial Sequence
  LDLR targeting guide sequence portion
auuugcacgaacuggacugugu

SEQ ID NO: 8008 - RNA, 22 nt, Artificial Sequence
  LDLR targeting guide sequence portion
auuugcauagaaguggaagcac

SEQ ID NO: 8009 - RNA, 22 nt, Artificial Sequence
  LDLR targeting guide sequence portion
auuuggccagacacaggugccu

SEQ ID NO: 8010 - RNA, 22 nt, Artificial Sequence
  LDLR targeting guide sequence portion
auuuggugaaugaguuuggucu

SEQ ID NO: 8011 - RNA, 22 nt, Artificial Sequence
  LDLR targeting guide sequence portion
auuuguucagugacuauucucg

SEQ ID NO: 8012 - RNA, 22 nt, Artificial Sequence
  LDLR targeting guide sequence portion
auuuugcacuguuuucugucgu

SEQ ID NO: 8013 - RNA, 22 nt, Artificial Sequence
  LDLR targeting guide sequence portion
auuuugguuucuuccuuuccuc

SEQ ID NO: 8014 - RNA, 22 nt, Artificial Sequence
  LDLR targeting guide sequence portion
auuuuugcaaacccugguugcu

SEQ ID NO: 8015 - RNA, 22 nt, Artificial Sequence
  LDLR targeting guide sequence portion
caaaaaauccccacuaucugua

SEQ ID NO: 8016 - RNA, 22 nt, Artificial Sequence
  LDLR targeting guide sequence portion
caaaaagcguugcacacagucc

SEQ ID NO: 8017 - RNA, 22 nt, Artificial Sequence
  LDLR targeting guide sequence portion
caaaaaguuaaaaaucagcugg

SEQ ID NO: 8018 - RNA, 22 nt, Artificial Sequence
  LDLR targeting guide sequence portion
caaaacuuccuggagagaaaug

SEQ ID NO: 8019 - RNA, 22 nt, Artificial Sequence
  LDLR targeting guide sequence portion
caaaaucccaacccaagccauu

SEQ ID NO: 8020 - RNA, 22 nt, Artificial Sequence
  LDLR targeting guide sequence portion
caaacauaacaaaaaaucccca

SEQ ID NO: 8021 - RNA, 22 nt, Artificial Sequence
  LDLR targeting guide sequence portion
caaacauggaagaugaaagggg

SEQ ID NO: 8022 - RNA, 22 nt, Artificial Sequence
  LDLR targeting guide sequence portion
caaaccauccucccaccucagc

SEQ ID NO: 8023 - RNA, 22 nt, Artificial Sequence
  LDLR targeting guide sequence portion
caaacccaccucgaaagacacu

SEQ ID NO: 8024 - RNA, 22 nt, Artificial Sequence
  LDLR targeting guide sequence portion
caaaccccuaaacucaggaguc

SEQ ID NO: 8025 - RNA, 22 nt, Artificial Sequence
  LDLR targeting guide sequence portion
caaacccugguugcuguauuug

SEQ ID NO: 8026 - RNA, 22 nt, Artificial Sequence
  LDLR targeting guide sequence portion
caaacgauccagacuggaggau

SEQ ID NO: 8027 - RNA, 22 nt, Artificial Sequence
  LDLR targeting guide sequence portion
caaacucauucaccaaaugaug

SEQ ID NO: 8028 - RNA, 22 nt, Artificial Sequence
  LDLR targeting guide sequence portion
caaagacagagaagaccaaagc

SEQ ID NO: 8029 - RNA, 22 nt, Artificial Sequence
  LDLR targeting guide sequence portion
caaagauuauuugcacgaacug

SEQ ID NO: 8030 - RNA, 22 nt, Artificial Sequence
  LDLR targeting guide sequence portion
caaagcauugccugccagagcu

SEQ ID NO: 8031 - RNA, 22 nt, Artificial Sequence
  LDLR targeting guide sequence portion
caaagccgugaucgugaauauc

SEQ ID NO: 8032 - RNA, 22 nt, Artificial Sequence
  LDLR targeting guide sequence portion
caaagcgagaucccaucucuac

SEQ ID NO: 8033 - RNA, 22 nt, Artificial Sequence
  LDLR targeting guide sequence portion
caaagcucuggcaggcaaugcu

SEQ ID NO: 8034 - RNA, 22 nt, Artificial Sequence
  LDLR targeting guide sequence portion
caaaggcuaaccuggcugucua

SEQ ID NO: 8035 - RNA, 22 nt, Artificial Sequence
  LDLR targeting guide sequence portion
caaagugcaaacauaacaaaaa

SEQ ID NO: 8036 - RNA, 22 nt, Artificial Sequence
  LDLR targeting guide sequence portion
caaauacagcaaccaggguuug

SEQ ID NO: 8037 - RNA, 22 nt, Artificial Sequence
  LDLR targeting guide sequence portion
caaaugaugccacuucccagag

SEQ ID NO: 8038 - RNA, 22 nt, Artificial Sequence
  LDLR targeting guide sequence portion
caaaugccaaauguacacagug

SEQ ID NO: 8039 - RNA, 22 nt, Artificial Sequence
  LDLR targeting guide sequence portion
caaaugccuccaagccauucac

SEQ ID NO: 8040 - RNA, 22 nt, Artificial Sequence
  LDLR targeting guide sequence portion
caaaugccugagcucaaaccau

SEQ ID NO: 8041 - RNA, 22 nt, Artificial Sequence
  LDLR targeting guide sequence portion
caaauguacacaguguacaacu

SEQ ID NO: 8042 - RNA, 22 nt, Artificial Sequence
  LDLR targeting guide sequence portion
caaauucauuuuuuaagagaug

SEQ ID NO: 8043 - RNA, 22 nt, Artificial Sequence
  LDLR targeting guide sequence portion
caacacacaacagcagauggca

SEQ ID NO: 8044 - RNA, 22 nt, Artificial Sequence
  LDLR targeting guide sequence portion
caacacacacgacagaaaacag

SEQ ID NO: 8045 - RNA, 22 nt, Artificial Sequence
  LDLR targeting guide sequence portion
caacagaugaagacccuauuuc

SEQ ID NO: 8046 - RNA, 22 nt, Artificial Sequence
  LDLR targeting guide sequence portion
caacagcagauggcaccaacgg

SEQ ID NO: 8047 - RNA, 22 nt, Artificial Sequence
  LDLR targeting guide sequence portion
caacaguaacacggcgauuuca

SEQ ID NO: 8048 - RNA, 22 nt, Artificial Sequence
  LDLR targeting guide sequence portion
caaccaauauacaaagugcaaa

SEQ ID NO: 8049 - RNA, 22 nt, Artificial Sequence
  LDLR targeting guide sequence portion
caaccaggguuugcaaaaauaa

SEQ ID NO: 8050 - RNA, 22 nt, Artificial Sequence
  LDLR targeting guide sequence portion
caacccaagccauugcaugggc

SEQ ID NO: 8051 - RNA, 22 nt, Artificial Sequence
  LDLR targeting guide sequence portion
caaccugccccucucugucccc

SEQ ID NO: 8052 - RNA, 22 nt, Artificial Sequence
  LDLR targeting guide sequence portion
caacgacaagauuggggaagug

SEQ ID NO: 8053 - RNA, 22 nt, Artificial Sequence
  LDLR targeting guide sequence portion
caacgcuuuuugggagaaugau

SEQ ID NO: 8054 - RNA, 22 nt, Artificial Sequence
  LDLR targeting guide sequence portion
caacgggacccccuggcccugc

SEQ ID NO: 8055 - RNA, 22 nt, Artificial Sequence
  LDLR targeting guide sequence portion
caacggggacaucauucuccca

SEQ ID NO: 8056 - RNA, 22 nt, Artificial Sequence
  LDLR targeting guide sequence portion
caacguguuuaccucuucuaug

SEQ ID NO: 8057 - RNA, 22 nt, Artificial Sequence
  LDLR targeting guide sequence portion
caacuccugaacucaagugauc

SEQ ID NO: 8058 - RNA, 22 nt, Artificial Sequence
  LDLR targeting guide sequence portion
caacucugaacugagaaagugc

SEQ ID NO: 8059 - RNA, 22 nt, Artificial Sequence
  LDLR targeting guide sequence portion
caagauuggggaagugaauggc

SEQ ID NO: 8060 - RNA, 22 nt, Artificial Sequence
  LDLR targeting guide sequence portion
caagccauucacuuccccaauc

SEQ ID NO: 8061 - RNA, 22 nt, Artificial Sequence
  LDLR targeting guide sequence portion
caagccauugcaugggcacugu

SEQ ID NO: 8062 - RNA, 22 nt, Artificial Sequence
  LDLR targeting guide sequence portion
caagccuugcuagacagccagg

SEQ ID NO: 8063 - RNA, 22 nt, Artificial Sequence
  LDLR targeting guide sequence portion
caaggagaccacgggaauggaa

SEQ ID NO: 8064 - RNA, 22 nt, Artificial Sequence
  LDLR targeting guide sequence portion
caaggccggcgaggucucagga

SEQ ID NO: 8065 - RNA, 22 nt, Artificial Sequence
  LDLR targeting guide sequence portion
caaggcuugcauagaagaggua

SEQ ID NO: 8066 - RNA, 22 nt, Artificial Sequence
  LDLR targeting guide sequence portion
caagggauuggcaauugucccc

SEQ ID NO: 8067 - RNA, 22 nt, Artificial Sequence
  LDLR targeting guide sequence portion
caagguaaccgggugucucagg

SEQ ID NO: 8068 - RNA, 22 nt, Artificial Sequence
  LDLR targeting guide sequence portion
caagugauccagcucagccucc

SEQ ID NO: 8069 - RNA, 22 nt, Artificial Sequence
  LDLR targeting guide sequence portion
caaguggcuuucaacacacaac

SEQ ID NO: 8070 - RNA, 22 nt, Artificial Sequence
  LDLR targeting guide sequence portion
caauaacccccuacacagggcc

SEQ ID NO: 8071 - RNA, 22 nt, Artificial Sequence
  LDLR targeting guide sequence portion
caaucccuugugacaucuucac

SEQ ID NO: 8072 - RNA, 22 nt, Artificial Sequence
  LDLR targeting guide sequence portion
caauccucaaacauggaagaug

SEQ ID NO: 8073 - RNA, 22 nt, Artificial Sequence
  LDLR targeting guide sequence portion
caaucucuaagccaaaccccua

SEQ ID NO: 8074 - RNA, 22 nt, Artificial Sequence
  LDLR targeting guide sequence portion
caaucuugucguugauggguau

SEQ ID NO: 8075 - RNA, 22 nt, Artificial Sequence
  LDLR targeting guide sequence portion
caaugaaugccggggacagaga

SEQ ID NO: 8076 - RNA, 22 nt, Artificial Sequence
  LDLR targeting guide sequence portion
caaugcuuuggucuucucuguc

SEQ ID NO: 8077 - RNA, 22 nt, Artificial Sequence
  LDLR targeting guide sequence portion
caauggcaguucucgauauuca

SEQ ID NO: 8078 - RNA, 22 nt, Artificial Sequence
  LDLR targeting guide sequence portion
caauggcuuggguugggauuuu

SEQ ID NO: 8079 - RNA, 22 nt, Artificial Sequence
  LDLR targeting guide sequence portion
caauugccaaucccuugugaca

SEQ ID NO: 8080 - RNA, 22 nt, Artificial Sequence
  LDLR targeting guide sequence portion
caauuguccccagggacaaaac

SEQ ID NO: 8081 - RNA, 22 nt, Artificial Sequence
  LDLR targeting guide sequence portion
cacaaaugccaaauguacacag

SEQ ID NO: 8082 - RNA, 22 nt, Artificial Sequence
  LDLR targeting guide sequence portion
cacaacagcagauggcaccaac

SEQ ID NO: 8083 - RNA, 22 nt, Artificial Sequence
  LDLR targeting guide sequence portion
cacaagggauuggcaauugucc

SEQ ID NO: 8084 - RNA, 22 nt, Artificial Sequence
  LDLR targeting guide sequence portion
cacaauccucaaacauggaaga

SEQ ID NO: 8085 - RNA, 22 nt, Artificial Sequence
  LDLR targeting guide sequence portion
cacacaacagcagauggcacca

SEQ ID NO: 8086 - RNA, 22 nt, Artificial Sequence
  LDLR targeting guide sequence portion
cacacacgacagaaaacagugc

SEQ ID NO: 8087 - RNA, 22 nt, Artificial Sequence
  LDLR targeting guide sequence portion
cacacaguccaguucgugcaaa

SEQ ID NO: 8088 - RNA, 22 nt, Artificial Sequence
  LDLR targeting guide sequence portion
cacaccugggugcaggccacgu

SEQ ID NO: 8089 - RNA, 22 nt, Artificial Sequence
  LDLR targeting guide sequence portion
cacaggcacgugccaccguacc

SEQ ID NO: 8090 - RNA, 22 nt, Artificial Sequence
  LDLR targeting guide sequence portion
cacagggccccgagaauaguca

SEQ ID NO: 8091 - RNA, 22 nt, Artificial Sequence
  LDLR targeting guide sequence portion
cacaggugccucacgccuguaa

SEQ ID NO: 8092 - RNA, 22 nt, Artificial Sequence
  LDLR targeting guide sequence portion
cacaguaagacauucaggcuac

SEQ ID NO: 8093 - RNA, 22 nt, Artificial Sequence
  LDLR targeting guide sequence portion
cacaguccaguucgugcaaaua

SEQ ID NO: 8094 - RNA, 22 nt, Artificial Sequence
  LDLR targeting guide sequence portion
cacaguguacaacucugaacug

SEQ ID NO: 8095 - RNA, 22 nt, Artificial Sequence
  LDLR targeting guide sequence portion
cacaguguuuugucccugggga

SEQ ID NO: 8096 - RNA, 22 nt, Artificial Sequence
  LDLR targeting guide sequence portion
cacauacccaucaacgacaaga

SEQ ID NO: 8097 - RNA, 22 nt, Artificial Sequence
  LDLR targeting guide sequence portion
caccaaaugaugccacuuccca

SEQ ID NO: 8098 - RNA, 22 nt, Artificial Sequence
  LDLR targeting guide sequence portion
caccaacgggacccccuggccc

SEQ ID NO: 8099 - RNA, 22 nt, Artificial Sequence
  LDLR targeting guide sequence portion
caccaaucucuaagccaaaccc

SEQ ID NO: 8100 - RNA, 22 nt, Artificial Sequence
  LDLR targeting guide sequence portion
caccacggauucagccagauca

SEQ ID NO: 8101 - RNA, 22 nt, Artificial Sequence
  LDLR targeting guide sequence portion
caccagccuggugcccauccuc

SEQ ID NO: 8102 - RNA, 22 nt, Artificial Sequence
  LDLR targeting guide sequence portion
caccaggcugguguccugacag

SEQ ID NO: 8103 - RNA, 22 nt, Artificial Sequence
  LDLR targeting guide sequence portion
cacccagguguggcugucagga

SEQ ID NO: 8104 - RNA, 22 nt, Artificial Sequence
  LDLR targeting guide sequence portion
cacccagugucuuucgaggugg

SEQ ID NO: 8105 - RNA, 22 nt, Artificial Sequence
  LDLR targeting guide sequence portion
cacccaucucccagaagccacu

SEQ ID NO: 8106 - RNA, 22 nt, Artificial Sequence
  LDLR targeting guide sequence portion
cacccccgaaucaugacccacc

SEQ ID NO: 8107 - RNA, 22 nt, Artificial Sequence
  LDLR targeting guide sequence portion
cacccgguuaccuuggccguga

SEQ ID NO: 8108 - RNA, 22 nt, Artificial Sequence
  LDLR targeting guide sequence portion
cacccuuaauauuuauuaagug

SEQ ID NO: 8109 - RNA, 22 nt, Artificial Sequence
  LDLR targeting guide sequence portion
caccgagaccaaacucauucac

SEQ ID NO: 8110 - RNA, 22 nt, Artificial Sequence
  LDLR targeting guide sequence portion
caccguacccagcugauuuuua

SEQ ID NO: 8111 - RNA, 22 nt, Artificial Sequence
  LDLR targeting guide sequence portion
caccgugacacaauccucaaac

SEQ ID NO: 8112 - RNA, 22 nt, Artificial Sequence
  LDLR targeting guide sequence portion
caccgugcauguuuuaaacaca

SEQ ID NO: 8113 - RNA, 22 nt, Artificial Sequence
  LDLR targeting guide sequence portion
caccuagugcuuccacuucuau

SEQ ID NO: 8114 - RNA, 22 nt, Artificial Sequence
  LDLR targeting guide sequence portion
caccucagccucgccaugccug

SEQ ID NO: 8115 - RNA, 22 nt, Artificial Sequence
  LDLR targeting guide sequence portion
caccuccauuucucuccaggaa

SEQ ID NO: 8116 - RNA, 22 nt, Artificial Sequence
  LDLR targeting guide sequence portion
caccucgaaagacacugggugg

SEQ ID NO: 8117 - RNA, 22 nt, Artificial Sequence
  LDLR targeting guide sequence portion
caccugggugcaggccacgugu

SEQ ID NO: 8118 - RNA, 22 nt, Artificial Sequence
  LDLR targeting guide sequence portion
cacgaacuggacugugugcaac

SEQ ID NO: 8119 - RNA, 22 nt, Artificial Sequence
  LDLR targeting guide sequence portion
cacgacagaaaacagugcaaaa

SEQ ID NO: 8120 - RNA, 22 nt, Artificial Sequence
  LDLR targeting guide sequence portion
cacgacagccucaaaugccuga

SEQ ID NO: 8121 - RNA, 22 nt, Artificial Sequence
  LDLR targeting guide sequence portion
cacgaggaaaggaagaaaccaa

SEQ ID NO: 8122 - RNA, 22 nt, Artificial Sequence
  LDLR targeting guide sequence portion
cacgaucacggcuuugaagucc

SEQ ID NO: 8123 - RNA, 22 nt, Artificial Sequence
  LDLR targeting guide sequence portion
cacgccacgucauccuccagac

SEQ ID NO: 8124 - RNA, 22 nt, Artificial Sequence
  LDLR targeting guide sequence portion
cacggauucagccagaucauuu

SEQ ID NO: 8125 - RNA, 22 nt, Artificial Sequence
  LDLR targeting guide sequence portion
cacggccaagguaaccgggugu

SEQ ID NO: 8126 - RNA, 22 nt, Artificial Sequence
  LDLR targeting guide sequence portion
cacggcgauuucagaaagaacc

SEQ ID NO: 8127 - RNA, 22 nt, Artificial Sequence
  LDLR targeting guide sequence portion
cacggcuuugaagucccgguca

SEQ ID NO: 8128 - RNA, 22 nt, Artificial Sequence
  LDLR targeting guide sequence portion
cacgggaauggaaguggguagg

SEQ ID NO: 8129 - RNA, 22 nt, Artificial Sequence
  LDLR targeting guide sequence portion
cacgggcuuucccuggccuggg

SEQ ID NO: 8130 - RNA, 22 nt, Artificial Sequence
  LDLR targeting guide sequence portion
cacggugaggccgggcgcagug

SEQ ID NO: 8131 - RNA, 22 nt, Artificial Sequence
  LDLR targeting guide sequence portion
cacgguggagagaaacucaaaa

SEQ ID NO: 8132 - RNA, 22 nt, Artificial Sequence
  LDLR targeting guide sequence portion
cacguaaaugcgucccuguaca

SEQ ID NO: 8133 - RNA, 22 nt, Artificial Sequence
  LDLR targeting guide sequence portion
cacgucauccuccagacugacc

SEQ ID NO: 8134 - RNA, 22 nt, Artificial Sequence
  LDLR targeting guide sequence portion
cacgugccaccguacccagcug

SEQ ID NO: 8135 - RNA, 22 nt, Artificial Sequence
  LDLR targeting guide sequence portion
cacguggccugcacccaggugu

SEQ ID NO: 8136 - RNA, 22 nt, Artificial Sequence
  LDLR targeting guide sequence portion
cacguguccucacggccaaggu

SEQ ID NO: 8137 - RNA, 22 nt, Artificial Sequence
  LDLR targeting guide sequence portion
cacguugacuccugaguuuagg

SEQ ID NO: 8138 - RNA, 22 nt, Artificial Sequence
  LDLR targeting guide sequence portion
cacuaggugggcggacauaaag

SEQ ID NO: 8139 - RNA, 22 nt, Artificial Sequence
  LDLR targeting guide sequence portion
cacuaucuguacagggacgcau

SEQ ID NO: 8140 - RNA, 22 nt, Artificial Sequence
  LDLR targeting guide sequence portion
cacucauacauacaacggggac

SEQ ID NO: 8141 - RNA, 22 nt, Artificial Sequence
  LDLR targeting guide sequence portion
cacugaacaaauacagcaacca

SEQ ID NO: 8142 - RNA, 22 nt, Artificial Sequence
  LDLR targeting guide sequence portion
cacugauguccggagagacagu

SEQ ID NO: 8143 - RNA, 22 nt, Artificial Sequence
  LDLR targeting guide sequence portion
cacugcgcccggccucaccgug

SEQ ID NO: 8144 - RNA, 22 nt, Artificial Sequence
  LDLR targeting guide sequence portion
cacugcuuuccagccugggcaa

SEQ ID NO: 8145 - RNA, 22 nt, Artificial Sequence
  LDLR targeting guide sequence portion
cacugggugggucaugauucgg

SEQ ID NO: 8146 - RNA, 22 nt, Artificial Sequence
  LDLR targeting guide sequence portion
cacuggucacccuuaauauuua

SEQ ID NO: 8147 - RNA, 22 nt, Artificial Sequence
  LDLR targeting guide sequence portion
cacuguauagaagguuuuugua

SEQ ID NO: 8148 - RNA, 22 nt, Artificial Sequence
  LDLR targeting guide sequence portion
cacuguccgaagccuguucugc

SEQ ID NO: 8149 - RNA, 22 nt, Artificial Sequence
  LDLR targeting guide sequence portion
cacugucucuccggacaucagu

SEQ ID NO: 8150 - RNA, 22 nt, Artificial Sequence
  LDLR targeting guide sequence portion
cacuguguacauuuggcauuug

SEQ ID NO: 8151 - RNA, 22 nt, Artificial Sequence
  LDLR targeting guide sequence portion
cacuguuuucugucgugugugu

SEQ ID NO: 8152 - RNA, 22 nt, Artificial Sequence
  LDLR targeting guide sequence portion
cacuuaauaaauauuaagggug

SEQ ID NO: 8153 - RNA, 22 nt, Artificial Sequence
  LDLR targeting guide sequence portion
cacuuccauucccguggucucc

SEQ ID NO: 8154 - RNA, 22 nt, Artificial Sequence
  LDLR targeting guide sequence portion
cacuucccagaggcagagccug

SEQ ID NO: 8155 - RNA, 22 nt, Artificial Sequence
  LDLR targeting guide sequence portion
cacuuccccaaucuugucguug

SEQ ID NO: 8156 - RNA, 22 nt, Artificial Sequence
  LDLR targeting guide sequence portion
cacuucuaugcaaaugccucca

SEQ ID NO: 8157 - RNA, 22 nt, Artificial Sequence
  LDLR targeting guide sequence portion
cacuugcuucucugggccugac

SEQ ID NO: 8158 - RNA, 22 nt, Artificial Sequence
  LDLR targeting guide sequence portion
cacuuucucaguucagaguugu

SEQ ID NO: 8159 - RNA, 22 nt, Artificial Sequence
  LDLR targeting guide sequence portion
cacuuugggaggcugagcugga

SEQ ID NO: 8160 - RNA, 22 nt, Artificial Sequence
  LDLR targeting guide sequence portion
cacuuuuuaaaccacuguauag

SEQ ID NO: 8161 - RNA, 22 nt, Artificial Sequence
  LDLR targeting guide sequence portion
cagaaagaaccugaagucccgu

SEQ ID NO: 8162 - RNA, 22 nt, Artificial Sequence
  LDLR targeting guide sequence portion
cagaaaggcuuaucacgguucc

SEQ ID NO: 8163 - RNA, 22 nt, Artificial Sequence
  LDLR targeting guide sequence portion
cagaacaggcuucggacagugc

SEQ ID NO: 8164 - RNA, 22 nt, Artificial Sequence
  LDLR targeting guide sequence portion
cagaacccuuccugagaccucg

SEQ ID NO: 8165 - RNA, 22 nt, Artificial Sequence
  LDLR targeting guide sequence portion
cagaagccacucauacauacaa

SEQ ID NO: 8166 - RNA, 22 nt, Artificial Sequence
  LDLR targeting guide sequence portion
cagacacaggugccucacgccu

SEQ ID NO: 8167 - RNA, 22 nt, Artificial Sequence
  LDLR targeting guide sequence portion
cagacucccgcgugaagauguc

SEQ ID NO: 8168 - RNA, 22 nt, Artificial Sequence
  LDLR targeting guide sequence portion
cagagaagaccaaagcauugcc

SEQ ID NO: 8169 - RNA, 22 nt, Artificial Sequence
  LDLR targeting guide sequence portion
cagagaagcaaguggcuuucaa

SEQ ID NO: 8170 - RNA, 22 nt, Artificial Sequence
  LDLR targeting guide sequence portion
cagagaggggcagguugaccgg

SEQ ID NO: 8171 - RNA, 22 nt, Artificial Sequence
  LDLR targeting guide sequence portion
cagagccugagucacuggucac

SEQ ID NO: 8172 - RNA, 22 nt, Artificial Sequence
  LDLR targeting guide sequence portion
cagaggcaauaacccccuacac

SEQ ID NO: 8173 - RNA, 22 nt, Artificial Sequence
  LDLR targeting guide sequence portion
cagaggcagagccugagucacu

SEQ ID NO: 8174 - RNA, 22 nt, Artificial Sequence
  LDLR targeting guide sequence portion
cagaggccaugggcugcugaug

SEQ ID NO: 8175 - RNA, 22 nt, Artificial Sequence
  LDLR targeting guide sequence portion
cagaguuguacacuguguacau

SEQ ID NO: 8176 - RNA, 22 nt, Artificial Sequence
  LDLR targeting guide sequence portion
cagauaguggggauuuuuuguu

SEQ ID NO: 8177 - RNA, 22 nt, Artificial Sequence
  LDLR targeting guide sequence portion
cagaucauuuccgacgccauga

SEQ ID NO: 8178 - RNA, 22 nt, Artificial Sequence
  LDLR targeting guide sequence portion
cagaugaagacccuauuucaga

SEQ ID NO: 8179 - RNA, 22 nt, Artificial Sequence
  LDLR targeting guide sequence portion
cagauggcaccaacgggacccc

SEQ ID NO: 8180 - RNA, 22 nt, Artificial Sequence
  LDLR targeting guide sequence portion
cagauggucagucuggaggaug

SEQ ID NO: 8181 - RNA, 22 nt, Artificial Sequence
  LDLR targeting guide sequence portion
cagauguucacgccacgucauc

SEQ ID NO: 8182 - RNA, 22 nt, Artificial Sequence
  LDLR targeting guide sequence portion
cagcaaccaggguuugcaaaaa

SEQ ID NO: 8183 - RNA, 22 nt, Artificial Sequence
  LDLR targeting guide sequence portion
cagcacuuugggaggcugagcu

SEQ ID NO: 8184 - RNA, 22 nt, Artificial Sequence
  LDLR targeting guide sequence portion
cagcagauggcaccaacgggac

SEQ ID NO: 8185 - RNA, 22 nt, Artificial Sequence
  LDLR targeting guide sequence portion
cagcagcccauggccucuggcc

SEQ ID NO: 8186 - RNA, 22 nt, Artificial Sequence
  LDLR targeting guide sequence portion
cagccacaccugggugcaggcc

SEQ ID NO: 8187 - RNA, 22 nt, Artificial Sequence
  LDLR targeting guide sequence portion
cagccagaucauuuccgacgcc

SEQ ID NO: 8188 - RNA, 22 nt, Artificial Sequence
  LDLR targeting guide sequence portion
cagccagguuagccuuugcccu

SEQ ID NO: 8189 - RNA, 22 nt, Artificial Sequence
  LDLR targeting guide sequence portion
cagcccauggccucuggccagg

SEQ ID NO: 8190 - RNA, 22 nt, Artificial Sequence
  LDLR targeting guide sequence portion
cagccucaaaugccugagcuca

SEQ ID NO: 8191 - RNA, 22 nt, Artificial Sequence
  LDLR targeting guide sequence portion
cagccuccgucagacucccgcg

SEQ ID NO: 8192 - RNA, 22 nt, Artificial Sequence
  LDLR targeting guide sequence portion
cagccucgccaugccuggccag

SEQ ID NO: 8193 - RNA, 22 nt, Artificial Sequence
  LDLR targeting guide sequence portion
cagccuggugcccauccucccg

SEQ ID NO: 8194 - RNA, 22 nt, Artificial Sequence
  LDLR targeting guide sequence portion
cagcuggguacgguggcacgug

SEQ ID NO: 8195 - RNA, 22 nt, Artificial Sequence
  LDLR targeting guide sequence portion
caggaaagggauucauggcguc

SEQ ID NO: 8196 - RNA, 22 nt, Artificial Sequence
  LDLR targeting guide sequence portion
caggaaggguucugggcaggga

SEQ ID NO: 8197 - RNA, 22 nt, Artificial Sequence
  LDLR targeting guide sequence portion
caggaaguuuugaguuucucuc

SEQ ID NO: 8198 - RNA, 22 nt, Artificial Sequence
  LDLR targeting guide sequence portion
caggacaccagccuggugccca

SEQ ID NO: 8199 - RNA, 22 nt, Artificial Sequence
  LDLR targeting guide sequence portion
caggagucaacguguuuaccuc

SEQ ID NO: 8200 - RNA, 22 nt, Artificial Sequence
  LDLR targeting guide sequence portion
caggaguuggagaccaggccug

SEQ ID NO: 8201 - RNA, 22 nt, Artificial Sequence
  LDLR targeting guide sequence portion
caggaugacaccuccauuucuc

SEQ ID NO: 8202 - RNA, 22 nt, Artificial Sequence
  LDLR targeting guide sequence portion
caggcaaugcuuuggucuucuc

SEQ ID NO: 8203 - RNA, 22 nt, Artificial Sequence
  LDLR targeting guide sequence portion
caggcacgugccaccguaccca

SEQ ID NO: 8204 - RNA, 22 nt, Artificial Sequence
  LDLR targeting guide sequence portion
caggcacuuaauaaauauuaag

SEQ ID NO: 8205 - RNA, 22 nt, Artificial Sequence
  LDLR targeting guide sequence portion
caggcagauguucacgccacgu

SEQ ID NO: 8206 - RNA, 22 nt, Artificial Sequence
  LDLR targeting guide sequence portion
caggcauggcgaggcugaggug

SEQ ID NO: 8207 - RNA, 22 nt, Artificial Sequence
  LDLR targeting guide sequence portion
caggcauuugaggcugucguga

SEQ ID NO: 8208 - RNA, 22 nt, Artificial Sequence
  LDLR targeting guide sequence portion
caggccacguguccucacggcc

SEQ ID NO: 8209 - RNA, 22 nt, Artificial Sequence
  LDLR targeting guide sequence portion
caggccagggaaagcccguguc

SEQ ID NO: 8210 - RNA, 22 nt, Artificial Sequence
  LDLR targeting guide sequence portion
caggcccagagaagcaaguggc

SEQ ID NO: 8211 - RNA, 22 nt, Artificial Sequence
  LDLR targeting guide sequence portion
caggcccggggggaccaggaug

SEQ ID NO: 8212 - RNA, 22 nt, Artificial Sequence
  LDLR targeting guide sequence portion
caggccugagcaacaaagcgag

SEQ ID NO: 8213 - RNA, 22 nt, Artificial Sequence
  LDLR targeting guide sequence portion
caggccuggucuccaacuccug

SEQ ID NO: 8214 - RNA, 22 nt, Artificial Sequence
  LDLR targeting guide sequence portion
caggcgugaggcaccugugucu

SEQ ID NO: 8215 - RNA, 22 nt, Artificial Sequence
  LDLR targeting guide sequence portion
caggcuacaaaaaccuucuaua

SEQ ID NO: 8216 - RNA, 22 nt, Artificial Sequence
  LDLR targeting guide sequence portion
caggcucugccucugggaagug

SEQ ID NO: 8217 - RNA, 22 nt, Artificial Sequence
  LDLR targeting guide sequence portion
caggcuggaaagcaguggcaua

SEQ ID NO: 8218 - RNA, 22 nt, Artificial Sequence
  LDLR targeting guide sequence portion
caggcugguguccugacagcca

SEQ ID NO: 8219 - RNA, 22 nt, Artificial Sequence
  LDLR targeting guide sequence portion
caggcuucggacagugcccaug

SEQ ID NO: 8220 - RNA, 22 nt, Artificial Sequence
  LDLR targeting guide sequence portion
cagggaaagcccgugucaauga

SEQ ID NO: 8221 - RNA, 22 nt, Artificial Sequence
  LDLR targeting guide sequence portion
cagggaaccgugauaagccuuu

SEQ ID NO: 8222 - RNA, 22 nt, Artificial Sequence
  LDLR targeting guide sequence portion
cagggacgcauuuacgugcucc

SEQ ID NO: 8223 - RNA, 22 nt, Artificial Sequence
  LDLR targeting guide sequence portion
cagggacgggacuccaggcaga

SEQ ID NO: 8224 - RNA, 22 nt, Artificial Sequence
  LDLR targeting guide sequence portion
cagggcaaaggcuaaccuggcu

SEQ ID NO: 8225 - RNA, 22 nt, Artificial Sequence
  LDLR targeting guide sequence portion
cagggccagggggucccguugg

SEQ ID NO: 8226 - RNA, 22 nt, Artificial Sequence
  LDLR targeting guide sequence portion
cagggccccgagaauagucacu

SEQ ID NO: 8227 - RNA, 22 nt, Artificial Sequence
  LDLR targeting guide sequence portion
cagggggucccguuggugccau

SEQ ID NO: 8228 - RNA, 22 nt, Artificial Sequence
  LDLR targeting guide sequence portion
cagguguggcugucaggacacc

SEQ ID NO: 8229 - RNA, 22 nt, Artificial Sequence
  LDLR targeting guide sequence portion
cagguuagccuuugcccuguca

SEQ ID NO: 8230 - RNA, 22 nt, Artificial Sequence
  LDLR targeting guide sequence portion
cagguucuuucugaaaucgccg

SEQ ID NO: 8231 - RNA, 22 nt, Artificial Sequence
  LDLR targeting guide sequence portion
cagguugaccgggacuucaaag

SEQ ID NO: 8232 - RNA, 22 nt, Artificial Sequence
  LDLR targeting guide sequence portion
caguaacacggcgauuucagaa

SEQ ID NO: 8233 - RNA, 22 nt, Artificial Sequence
  LDLR targeting guide sequence portion
caguaagacauucaggcuacaa

SEQ ID NO: 8234 - RNA, 22 nt, Artificial Sequence
  LDLR targeting guide sequence portion
caguccaguucgugcaaauaau

SEQ ID NO: 8235 - RNA, 22 nt, Artificial Sequence
  LDLR targeting guide sequence portion
cagucuggaggaugacguggcg

SEQ ID NO: 8236 - RNA, 22 nt, Artificial Sequence
  LDLR targeting guide sequence portion
cagucuggaucguuugacggga

SEQ ID NO: 8237 - RNA, 22 nt, Artificial Sequence
  LDLR targeting guide sequence portion
cagugacagccuccgucagacu

SEQ ID NO: 8238 - RNA, 22 nt, Artificial Sequence
  LDLR targeting guide sequence portion
cagugacuauucucggggcccu

SEQ ID NO: 8239 - RNA, 22 nt, Artificial Sequence
  LDLR targeting guide sequence portion
cagugacucaggcucugccucu

SEQ ID NO: 8240 - RNA, 22 nt, Artificial Sequence
  LDLR targeting guide sequence portion
cagugcaaaauaauaacacaaa

SEQ ID NO: 8241 - RNA, 22 nt, Artificial Sequence
  LDLR targeting guide sequence portion
cagugcaacaguaacacggcga

SEQ ID NO: 8242 - RNA, 22 nt, Artificial Sequence
  LDLR targeting guide sequence portion
cagugcagggaaccgugauaag

SEQ ID NO: 8243 - RNA, 22 nt, Artificial Sequence
  LDLR targeting guide sequence portion
cagugcccaugcaauggcuugg

SEQ ID NO: 8244 - RNA, 22 nt, Artificial Sequence
  LDLR targeting guide sequence portion
cagugguuuaaaaagugacacc

SEQ ID NO: 8245 - RNA, 22 nt, Artificial Sequence
  LDLR targeting guide sequence portion
caguguacaacucugaacugag

SEQ ID NO: 8246 - RNA, 22 nt, Artificial Sequence
  LDLR targeting guide sequence portion
cagugucuuucgagguggguuu

SEQ ID NO: 8247 - RNA, 22 nt, Artificial Sequence
  LDLR targeting guide sequence portion
caguguuuugucccuggggaca

SEQ ID NO: 8248 - RNA, 22 nt, Artificial Sequence
  LDLR targeting guide sequence portion
caguucagaguuguacacugug

SEQ ID NO: 8249 - RNA, 22 nt, Artificial Sequence
  LDLR targeting guide sequence portion
caguucgugcaaauaaucuuug

SEQ ID NO: 8250 - RNA, 22 nt, Artificial Sequence
  LDLR targeting guide sequence portion
caguucucgauauucacgauca

SEQ ID NO: 8251 - RNA, 22 nt, Artificial Sequence
  LDLR targeting guide sequence portion
caguuucaaccaauauacaaag

SEQ ID NO: 8252 - RNA, 22 nt, Artificial Sequence
  LDLR targeting guide sequence portion
cauaaagaagaggcauuucaga

SEQ ID NO: 8253 - RNA, 22 nt, Artificial Sequence
  LDLR targeting guide sequence portion
cauaaagacgacaauggcaguu

SEQ ID NO: 8254 - RNA, 22 nt, Artificial Sequence
  LDLR targeting guide sequence portion
cauaacaaaaaauccccacuau

SEQ ID NO: 8255 - RNA, 22 nt, Artificial Sequence
  LDLR targeting guide sequence portion
cauaaucauagcucacgacagc

SEQ ID NO: 8256 - RNA, 22 nt, Artificial Sequence
  LDLR targeting guide sequence portion
cauacaacggggacaucauucu

SEQ ID NO: 8257 - RNA, 22 nt, Artificial Sequence
  LDLR targeting guide sequence portion
cauacauacaacggggacauca

SEQ ID NO: 8258 - RNA, 22 nt, Artificial Sequence
  LDLR targeting guide sequence portion
cauacccaucaacgacaagauu

SEQ ID NO: 8259 - RNA, 22 nt, Artificial Sequence
  LDLR targeting guide sequence portion
cauagaagagguaaacacguug

SEQ ID NO: 8260 - RNA, 22 nt, Artificial Sequence
  LDLR targeting guide sequence portion
cauagaaguggaagcacuaggu

SEQ ID NO: 8261 - RNA, 22 nt, Artificial Sequence
  LDLR targeting guide sequence portion
cauagcucacgacagccucaaa

SEQ ID NO: 8262 - RNA, 22 nt, Artificial Sequence
  LDLR targeting guide sequence portion
caucaacgacaagauuggggaa

SEQ ID NO: 8263 - RNA, 22 nt, Artificial Sequence
  LDLR targeting guide sequence portion
caucagcagcccauggccucug

SEQ ID NO: 8264 - RNA, 22 nt, Artificial Sequence
  LDLR targeting guide sequence portion
caucagugcaacaguaacacgg

SEQ ID NO: 8265 - RNA, 22 nt, Artificial Sequence
  LDLR targeting guide sequence portion
caucauucucccaaaaagcguu

SEQ ID NO: 8266 - RNA, 22 nt, Artificial Sequence
  LDLR targeting guide sequence portion
caucauuuggugaaugaguuug

SEQ ID NO: 8267 - RNA, 22 nt, Artificial Sequence
  LDLR targeting guide sequence portion
cauccaccaaucucuaagccaa

SEQ ID NO: 8268 - RNA, 22 nt, Artificial Sequence
  LDLR targeting guide sequence portion
caucccaacacacacgacagaa

SEQ ID NO: 8269 - RNA, 22 nt, Artificial Sequence
  LDLR targeting guide sequence portion
cauccccuccccuuucaucuuc

SEQ ID NO: 8270 - RNA, 22 nt, Artificial Sequence
  LDLR targeting guide sequence portion
cauccucccaccucagccucgc

SEQ ID NO: 8271 - RNA, 22 nt, Artificial Sequence
  LDLR targeting guide sequence portion
cauccucccgaccccuacccac

SEQ ID NO: 8272 - RNA, 22 nt, Artificial Sequence
  LDLR targeting guide sequence portion
cauccugguccccccgggccug

SEQ ID NO: 8273 - RNA, 22 nt, Artificial Sequence
  LDLR targeting guide sequence portion
caucucccagaagccacucaua

SEQ ID NO: 8274 - RNA, 22 nt, Artificial Sequence
  LDLR targeting guide sequence portion
caucucuuaaaaaaugaauuug

SEQ ID NO: 8275 - RNA, 22 nt, Artificial Sequence
  LDLR targeting guide sequence portion
caucugccuggagucccguccc

SEQ ID NO: 8276 - RNA, 22 nt, Artificial Sequence
  LDLR targeting guide sequence portion
caucugcuguuguguguugaaa

SEQ ID NO: 8277 - RNA, 22 nt, Artificial Sequence
  LDLR targeting guide sequence portion
caucugggaggcagaacaggcu

SEQ ID NO: 8278 - RNA, 22 nt, Artificial Sequence
  LDLR targeting guide sequence portion
caucuucacgcgggagucugac

SEQ ID NO: 8279 - RNA, 22 nt, Artificial Sequence
  LDLR targeting guide sequence portion
caucuuccauguuugaggauug

SEQ ID NO: 8280 - RNA, 22 nt, Artificial Sequence
  LDLR targeting guide sequence portion
caugaaucccuuuccuggcuua

SEQ ID NO: 8281 - RNA, 22 nt, Artificial Sequence
  LDLR targeting guide sequence portion
caugacccacccagugucuuuc

SEQ ID NO: 8282 - RNA, 22 nt, Artificial Sequence
  LDLR targeting guide sequence portion
caugauucgggggugacagggc

SEQ ID NO: 8283 - RNA, 22 nt, Artificial Sequence
  LDLR targeting guide sequence portion
caugcaauggcuuggguuggga

SEQ ID NO: 8284 - RNA, 22 nt, Artificial Sequence
  LDLR targeting guide sequence portion
caugcacggugaggccgggcgc

SEQ ID NO: 8285 - RNA, 22 nt, Artificial Sequence
  LDLR targeting guide sequence portion
caugcauggugcaucagcagcc

SEQ ID NO: 8286 - RNA, 22 nt, Artificial Sequence
  LDLR targeting guide sequence portion
caugccuggccagaggccaugg

SEQ ID NO: 8287 - RNA, 22 nt, Artificial Sequence
  LDLR targeting guide sequence portion
cauggaagaugaaaggggaggg

SEQ ID NO: 8288 - RNA, 22 nt, Artificial Sequence
  LDLR targeting guide sequence portion
cauggccucuggccaggcaugg

SEQ ID NO: 8289 - RNA, 22 nt, Artificial Sequence
  LDLR targeting guide sequence portion
cauggcgaggcugaggugggag

SEQ ID NO: 8290 - RNA, 22 nt, Artificial Sequence
  LDLR targeting guide sequence portion
cauggcgucggaaaugaucugg

SEQ ID NO: 8291 - RNA, 22 nt, Artificial Sequence
  LDLR targeting guide sequence portion
caugggcacuguccgaagccug

SEQ ID NO: 8292 - RNA, 22 nt, Artificial Sequence
  LDLR targeting guide sequence portion
caugggcugcugaugcaccaug

SEQ ID NO: 8293 - RNA, 22 nt, Artificial Sequence
  LDLR targeting guide sequence portion
cauggugcaucagcagcccaug

SEQ ID NO: 8294 - RNA, 22 nt, Artificial Sequence
  LDLR targeting guide sequence portion
cauguuugaggauugugucacg

SEQ ID NO: 8295 - RNA, 22 nt, Artificial Sequence
  LDLR targeting guide sequence portion
cauguuuuaaacacauacccau

SEQ ID NO: 8296 - RNA, 22 nt, Artificial Sequence
  LDLR targeting guide sequence portion
cauucaccaaaugaugccacuu

SEQ ID NO: 8297 - RNA, 22 nt, Artificial Sequence
  LDLR targeting guide sequence portion
cauucacuuccccaaucuuguc

SEQ ID NO: 8298 - RNA, 22 nt, Artificial Sequence
  LDLR targeting guide sequence portion
cauucaggcuacaaaaaccuuc

SEQ ID NO: 8299 - RNA, 22 nt, Artificial Sequence
  LDLR targeting guide sequence portion
cauucauugacacgggcuuucc

SEQ ID NO: 8300 - RNA, 22 nt, Artificial Sequence
  LDLR targeting guide sequence portion
cauucccguggucuccuugcac

SEQ ID NO: 8301 - RNA, 22 nt, Artificial Sequence
  LDLR targeting guide sequence portion
cauucucccaaaaagcguugca

SEQ ID NO: 8302 - RNA, 22 nt, Artificial Sequence
  LDLR targeting guide sequence portion
cauugacacgggcuuucccugg

SEQ ID NO: 8303 - RNA, 22 nt, Artificial Sequence
  LDLR targeting guide sequence portion
cauugcaugggcacuguccgaa

SEQ ID NO: 8304 - RNA, 22 nt, Artificial Sequence
  LDLR targeting guide sequence portion
cauugccugccagagcuuuguu

SEQ ID NO: 8305 - RNA, 22 nt, Artificial Sequence
  LDLR targeting guide sequence portion
cauugucgucuuuauguccgcc

SEQ ID NO: 8306 - RNA, 22 nt, Artificial Sequence
  LDLR targeting guide sequence portion
cauuuacgugcuccgaaaccag

SEQ ID NO: 8307 - RNA, 22 nt, Artificial Sequence
  LDLR targeting guide sequence portion
cauuucagaggcaauaaccccc

SEQ ID NO: 8308 - RNA, 22 nt, Artificial Sequence
  LDLR targeting guide sequence portion
cauuuccgacgccaugaauccc

SEQ ID NO: 8309 - RNA, 22 nt, Artificial Sequence
  LDLR targeting guide sequence portion
cauuucucuccaggaaguuuug

SEQ ID NO: 8310 - RNA, 22 nt, Artificial Sequence
  LDLR targeting guide sequence portion
cauuugaggcugucgugagcua

SEQ ID NO: 8311 - RNA, 22 nt, Artificial Sequence
  LDLR targeting guide sequence portion
cauuugcauagaaguggaagca

SEQ ID NO: 8312 - RNA, 22 nt, Artificial Sequence
  LDLR targeting guide sequence portion
cauuuggugaaugaguuugguc

SEQ ID NO: 8313 - RNA, 22 nt, Artificial Sequence
  LDLR targeting guide sequence portion
cauuuuuuaagagauggggucu

SEQ ID NO: 8314 - RNA, 22 nt, Artificial Sequence
  LDLR targeting guide sequence portion
ccaaaaagcguugcacacaguc

SEQ ID NO: 8315 - RNA, 22 nt, Artificial Sequence
  LDLR targeting guide sequence portion
ccaaaaaguuaaaaaucagcug

SEQ ID NO: 8316 - RNA, 22 nt, Artificial Sequence
  LDLR targeting guide sequence portion
ccaaaaucccaacccaagccau

SEQ ID NO: 8317 - RNA, 22 nt, Artificial Sequence
  LDLR targeting guide sequence portion
ccaaaccccuaaacucaggagu

SEQ ID NO: 8318 - RNA, 22 nt, Artificial Sequence
  LDLR targeting guide sequence portion
ccaaacucauucaccaaaugau

SEQ ID NO: 8319 - RNA, 22 nt, Artificial Sequence
  LDLR targeting guide sequence portion
ccaaagcauugccugccagagc

SEQ ID NO: 8320 - RNA, 22 nt, Artificial Sequence
  LDLR targeting guide sequence portion
ccaaaugaugccacuucccaga

SEQ ID NO: 8321 - RNA, 22 nt, Artificial Sequence
  LDLR targeting guide sequence portion
ccaaauguacacaguguacaac

SEQ ID NO: 8322 - RNA, 22 nt, Artificial Sequence
  LDLR targeting guide sequence portion
ccaaauucauuuuuuaagagau

SEQ ID NO: 8323 - RNA, 22 nt, Artificial Sequence
  LDLR targeting guide sequence portion
ccaacacacacgacagaaaaca

SEQ ID NO: 8324 - RNA, 22 nt, Artificial Sequence
  LDLR targeting guide sequence portion
ccaacccaagccauugcauggg

SEQ ID NO: 8325 - RNA, 22 nt, Artificial Sequence
  LDLR targeting guide sequence portion
ccaacgggacccccuggcccug

SEQ ID NO: 8326 - RNA, 22 nt, Artificial Sequence
  LDLR targeting guide sequence portion
ccaacuccugaacucaagugau

SEQ ID NO: 8327 - RNA, 22 nt, Artificial Sequence
  LDLR targeting guide sequence portion
ccaagccauucacuuccccaau

SEQ ID NO: 8328 - RNA, 22 nt, Artificial Sequence
  LDLR targeting guide sequence portion
ccaagccauugcaugggcacug

SEQ ID NO: 8329 - RNA, 22 nt, Artificial Sequence
  LDLR targeting guide sequence portion
ccaagguaaccgggugucucag

SEQ ID NO: 8330 - RNA, 22 nt, Artificial Sequence
  LDLR targeting guide sequence portion
ccaaucccuugugacaucuuca

SEQ ID NO: 8331 - RNA, 22 nt, Artificial Sequence
  LDLR targeting guide sequence portion
ccaaucucuaagccaaaccccu

SEQ ID NO: 8332 - RNA, 22 nt, Artificial Sequence
  LDLR targeting guide sequence portion
ccaaucuugucguugaugggua

SEQ ID NO: 8333 - RNA, 22 nt, Artificial Sequence
  LDLR targeting guide sequence portion
ccacaccugggugcaggccacg

SEQ ID NO: 8334 - RNA, 22 nt, Artificial Sequence
  LDLR targeting guide sequence portion
ccaccaaucucuaagccaaacc

SEQ ID NO: 8335 - RNA, 22 nt, Artificial Sequence
  LDLR targeting guide sequence portion
ccaccacggauucagccagauc

SEQ ID NO: 8336 - RNA, 22 nt, Artificial Sequence
  LDLR targeting guide sequence portion
ccacccagugucuuucgaggug

SEQ ID NO: 8337 - RNA, 22 nt, Artificial Sequence
  LDLR targeting guide sequence portion
ccaccguacccagcugauuuuu

SEQ ID NO: 8338 - RNA, 22 nt, Artificial Sequence
  LDLR targeting guide sequence portion
ccaccgugacacaauccucaaa

SEQ ID NO: 8339 - RNA, 22 nt, Artificial Sequence
  LDLR targeting guide sequence portion
ccaccuagugcuuccacuucua

SEQ ID NO: 8340 - RNA, 22 nt, Artificial Sequence
  LDLR targeting guide sequence portion
ccaccucagccucgccaugccu

SEQ ID NO: 8341 - RNA, 22 nt, Artificial Sequence
  LDLR targeting guide sequence portion
ccaccucgaaagacacugggug

SEQ ID NO: 8342 - RNA, 22 nt, Artificial Sequence
  LDLR targeting guide sequence portion
ccacggauucagccagaucauu

SEQ ID NO: 8343 - RNA, 22 nt, Artificial Sequence
  LDLR targeting guide sequence portion
ccacgggaauggaaguggguag

SEQ ID NO: 8344 - RNA, 22 nt, Artificial Sequence
  LDLR targeting guide sequence portion
ccacgucauccuccagacugac

SEQ ID NO: 8345 - RNA, 22 nt, Artificial Sequence
  LDLR targeting guide sequence portion
ccacguguccucacggccaagg

SEQ ID NO: 8346 - RNA, 22 nt, Artificial Sequence
  LDLR targeting guide sequence portion
ccacuaucuguacagggacgca

SEQ ID NO: 8347 - RNA, 22 nt, Artificial Sequence
  LDLR targeting guide sequence portion
ccacucauacauacaacgggga

SEQ ID NO: 8348 - RNA, 22 nt, Artificial Sequence
  LDLR targeting guide sequence portion
ccacugcgcccggccucaccgu

SEQ ID NO: 8349 - RNA, 22 nt, Artificial Sequence
  LDLR targeting guide sequence portion
ccacuguauagaagguuuuugu

SEQ ID NO: 8350 - RNA, 22 nt, Artificial Sequence
  LDLR targeting guide sequence portion
ccacuuccauucccguggucuc

SEQ ID NO: 8351 - RNA, 22 nt, Artificial Sequence
  LDLR targeting guide sequence portion
ccacuucccagaggcagagccu

SEQ ID NO: 8352 - RNA, 22 nt, Artificial Sequence
  LDLR targeting guide sequence portion
ccacuucuaugcaaaugccucc

SEQ ID NO: 8353 - RNA, 22 nt, Artificial Sequence
  LDLR targeting guide sequence portion
ccacuugcuucucugggccuga

SEQ ID NO: 8354 - RNA, 22 nt, Artificial Sequence
  LDLR targeting guide sequence portion
ccagaaaggcuuaucacgguuc

SEQ ID NO: 8355 - RNA, 22 nt, Artificial Sequence
  LDLR targeting guide sequence portion
ccagaacccuuccugagaccuc

SEQ ID NO: 8356 - RNA, 22 nt, Artificial Sequence
  LDLR targeting guide sequence portion
ccagaagccacucauacauaca

SEQ ID NO: 8357 - RNA, 22 nt, Artificial Sequence
  LDLR targeting guide sequence portion
ccagacacaggugccucacgcc

SEQ ID NO: 8358 - RNA, 22 nt, Artificial Sequence
  LDLR targeting guide sequence portion
ccagagaagcaaguggcuuuca

SEQ ID NO: 8359 - RNA, 22 nt, Artificial Sequence
  LDLR targeting guide sequence portion
ccagaggcagagccugagucac

SEQ ID NO: 8360 - RNA, 22 nt, Artificial Sequence
  LDLR targeting guide sequence portion
ccagaggccaugggcugcugau

SEQ ID NO: 8361 - RNA, 22 nt, Artificial Sequence
  LDLR targeting guide sequence portion
ccagaucauuuccgacgccaug

SEQ ID NO: 8362 - RNA, 22 nt, Artificial Sequence
  LDLR targeting guide sequence portion
ccagcacuuugggaggcugagc

SEQ ID NO: 8363 - RNA, 22 nt, Artificial Sequence
  LDLR targeting guide sequence portion
ccagccuggugcccauccuccc

SEQ ID NO: 8364 - RNA, 22 nt, Artificial Sequence
  LDLR targeting guide sequence portion
ccaggaaagggauucauggcgu

SEQ ID NO: 8365 - RNA, 22 nt, Artificial Sequence
  LDLR targeting guide sequence portion
ccaggaaguuuugaguuucucu

SEQ ID NO: 8366 - RNA, 22 nt, Artificial Sequence
  LDLR targeting guide sequence portion
ccaggaugacaccuccauuucu

SEQ ID NO: 8367 - RNA, 22 nt, Artificial Sequence
  LDLR targeting guide sequence portion
ccaggcagauguucacgccacg

SEQ ID NO: 8368 - RNA, 22 nt, Artificial Sequence
  LDLR targeting guide sequence portion
ccaggcauggcgaggcugaggu

SEQ ID NO: 8369 - RNA, 22 nt, Artificial Sequence
  LDLR targeting guide sequence portion
ccaggccagggaaagcccgugu

SEQ ID NO: 8370 - RNA, 22 nt, Artificial Sequence
  LDLR targeting guide sequence portion
ccaggccugagcaacaaagcga

SEQ ID NO: 8371 - RNA, 22 nt, Artificial Sequence
  LDLR targeting guide sequence portion
ccaggcuggaaagcaguggcau

SEQ ID NO: 8372 - RNA, 22 nt, Artificial Sequence
  LDLR targeting guide sequence portion
ccaggcugguguccugacagcc

SEQ ID NO: 8373 - RNA, 22 nt, Artificial Sequence
  LDLR targeting guide sequence portion
ccagggaaagcccgugucaaug

SEQ ID NO: 8374 - RNA, 22 nt, Artificial Sequence
  LDLR targeting guide sequence portion
ccagggggucccguuggugcca

SEQ ID NO: 8375 - RNA, 22 nt, Artificial Sequence
  LDLR targeting guide sequence portion
ccagguguggcugucaggacac

SEQ ID NO: 8376 - RNA, 22 nt, Artificial Sequence
  LDLR targeting guide sequence portion
ccagguuagccuuugcccuguc

SEQ ID NO: 8377 - RNA, 22 nt, Artificial Sequence
  LDLR targeting guide sequence portion
ccagucuggaucguuugacggg

SEQ ID NO: 8378 - RNA, 22 nt, Artificial Sequence
  LDLR targeting guide sequence portion
ccagugacucaggcucugccuc

SEQ ID NO: 8379 - RNA, 22 nt, Artificial Sequence
  LDLR targeting guide sequence portion
ccagugcagggaaccgugauaa

SEQ ID NO: 8380 - RNA, 22 nt, Artificial Sequence
  LDLR targeting guide sequence portion
ccagugucuuucgagguggguu

SEQ ID NO: 8381 - RNA, 22 nt, Artificial Sequence
  LDLR targeting guide sequence portion
ccaguucgugcaaauaaucuuu

SEQ ID NO: 8382 - RNA, 22 nt, Artificial Sequence
  LDLR targeting guide sequence portion
ccaucaacgacaagauugggga

SEQ ID NO: 8383 - RNA, 22 nt, Artificial Sequence
  LDLR targeting guide sequence portion
ccaucccaacacacacgacaga

SEQ ID NO: 8384 - RNA, 22 nt, Artificial Sequence
  LDLR targeting guide sequence portion
ccauccucccaccucagccucg

SEQ ID NO: 8385 - RNA, 22 nt, Artificial Sequence
  LDLR targeting guide sequence portion
ccauccucccgaccccuaccca

SEQ ID NO: 8386 - RNA, 22 nt, Artificial Sequence
  LDLR targeting guide sequence portion
ccaucucccagaagccacucau

SEQ ID NO: 8387 - RNA, 22 nt, Artificial Sequence
  LDLR targeting guide sequence portion
ccaucucuuaaaaaaugaauuu

SEQ ID NO: 8388 - RNA, 22 nt, Artificial Sequence
  LDLR targeting guide sequence portion
ccaucugcuguuguguguugaa

SEQ ID NO: 8389 - RNA, 22 nt, Artificial Sequence
  LDLR targeting guide sequence portion
ccaugaaucccuuuccuggcuu

SEQ ID NO: 8390 - RNA, 22 nt, Artificial Sequence
  LDLR targeting guide sequence portion
ccaugcaauggcuuggguuggg

SEQ ID NO: 8391 - RNA, 22 nt, Artificial Sequence
  LDLR targeting guide sequence portion
ccaugcauggugcaucagcagc

SEQ ID NO: 8392 - RNA, 22 nt, Artificial Sequence
  LDLR targeting guide sequence portion
ccaugccuggccagaggccaug

SEQ ID NO: 8393 - RNA, 22 nt, Artificial Sequence
  LDLR targeting guide sequence portion
ccauggccucuggccaggcaug

SEQ ID NO: 8394 - RNA, 22 nt, Artificial Sequence
  LDLR targeting guide sequence portion
ccaugggcugcugaugcaccau

SEQ ID NO: 8395 - RNA, 22 nt, Artificial Sequence
  LDLR targeting guide sequence portion
ccauguuugaggauugugucac

SEQ ID NO: 8396 - RNA, 22 nt, Artificial Sequence
  LDLR targeting guide sequence portion
ccauucacuuccccaaucuugu

SEQ ID NO: 8397 - RNA, 22 nt, Artificial Sequence
  LDLR targeting guide sequence portion
ccauucccguggucuccuugca

SEQ ID NO: 8398 - RNA, 22 nt, Artificial Sequence
  LDLR targeting guide sequence portion
ccauugcaugggcacuguccga

SEQ ID NO: 8399 - RNA, 22 nt, Artificial Sequence
  LDLR targeting guide sequence portion
ccauugucgucuuuauguccgc

SEQ ID NO: 8400 - RNA, 22 nt, Artificial Sequence
  LDLR targeting guide sequence portion
ccauuucucuccaggaaguuuu

SEQ ID NO: 8401 - RNA, 22 nt, Artificial Sequence
  LDLR targeting guide sequence portion
cccaaaaagcguugcacacagu

SEQ ID NO: 8402 - RNA, 22 nt, Artificial Sequence
  LDLR targeting guide sequence portion
cccaacacacacgacagaaaac

SEQ ID NO: 8403 - RNA, 22 nt, Artificial Sequence
  LDLR targeting guide sequence portion
cccaacccaagccauugcaugg

SEQ ID NO: 8404 - RNA, 22 nt, Artificial Sequence
  LDLR targeting guide sequence portion
cccaagccauugcaugggcacu

SEQ ID NO: 8405 - RNA, 22 nt, Artificial Sequence
  LDLR targeting guide sequence portion
cccaaucuugucguugaugggu

SEQ ID NO: 8406 - RNA, 22 nt, Artificial Sequence
  LDLR targeting guide sequence portion
cccacccagugucuuucgaggu

SEQ ID NO: 8407 - RNA, 22 nt, Artificial Sequence
  LDLR targeting guide sequence portion
cccaccuagugcuuccacuucu

SEQ ID NO: 8408 - RNA, 22 nt, Artificial Sequence
  LDLR targeting guide sequence portion
cccaccucagccucgccaugcc

SEQ ID NO: 8409 - RNA, 22 nt, Artificial Sequence
  LDLR targeting guide sequence portion
cccaccucgaaagacacugggu

SEQ ID NO: 8410 - RNA, 22 nt, Artificial Sequence
  LDLR targeting guide sequence portion
cccacuaucuguacagggacgc

SEQ ID NO: 8411 - RNA, 22 nt, Artificial Sequence
  LDLR targeting guide sequence portion
cccacuuccauucccguggucu

SEQ ID NO: 8412 - RNA, 22 nt, Artificial Sequence
  LDLR targeting guide sequence portion
cccagaacccuuccugagaccu

SEQ ID NO: 8413 - RNA, 22 nt, Artificial Sequence
  LDLR targeting guide sequence portion
cccagaagccacucauacauac

SEQ ID NO: 8414 - RNA, 22 nt, Artificial Sequence
  LDLR targeting guide sequence portion
cccagagaagcaaguggcuuuc

SEQ ID NO: 8415 - RNA, 22 nt, Artificial Sequence
  LDLR targeting guide sequence portion
cccagaggcagagccugaguca

SEQ ID NO: 8416 - RNA, 22 nt, Artificial Sequence
  LDLR targeting guide sequence portion
cccagcugauuuuuaacuuuuu

SEQ ID NO: 8417 - RNA, 22 nt, Artificial Sequence
  LDLR targeting guide sequence portion
cccaggccagggaaagcccgug

SEQ ID NO: 8418 - RNA, 22 nt, Artificial Sequence
  LDLR targeting guide sequence portion
cccaggcuggaaagcaguggca

SEQ ID NO: 8419 - RNA, 22 nt, Artificial Sequence
  LDLR targeting guide sequence portion
cccagguguggcugucaggaca

SEQ ID NO: 8420 - RNA, 22 nt, Artificial Sequence
  LDLR targeting guide sequence portion
cccagugcagggaaccgugaua

SEQ ID NO: 8421 - RNA, 22 nt, Artificial Sequence
  LDLR targeting guide sequence portion
cccagugucuuucgaggugggu

SEQ ID NO: 8422 - RNA, 22 nt, Artificial Sequence
  LDLR targeting guide sequence portion
cccaucaacgacaagauugggg

SEQ ID NO: 8423 - RNA, 22 nt, Artificial Sequence
  LDLR targeting guide sequence portion
cccaucccaacacacacgacag

SEQ ID NO: 8424 - RNA, 22 nt, Artificial Sequence
  LDLR targeting guide sequence portion
cccauccucccgaccccuaccc

SEQ ID NO: 8425 - RNA, 22 nt, Artificial Sequence
  LDLR targeting guide sequence portion
cccaucucccagaagccacuca

SEQ ID NO: 8426 - RNA, 22 nt, Artificial Sequence
  LDLR targeting guide sequence portion
cccaucucuacaaaaaccaaaa

SEQ ID NO: 8427 - RNA, 22 nt, Artificial Sequence
  LDLR targeting guide sequence portion
cccaucucuuaaaaaaugaauu

SEQ ID NO: 8428 - RNA, 22 nt, Artificial Sequence
  LDLR targeting guide sequence portion
cccaugcaauggcuuggguugg

SEQ ID NO: 8429 - RNA, 22 nt, Artificial Sequence
  LDLR targeting guide sequence portion
cccauggccucuggccaggcau

SEQ ID NO: 8430 - RNA, 22 nt, Artificial Sequence
  LDLR targeting guide sequence portion
ccccaaucuugucguugauggg

SEQ ID NO: 8431 - RNA, 22 nt, Artificial Sequence
  LDLR targeting guide sequence portion
ccccacuaucuguacagggacg

SEQ ID NO: 8432 - RNA, 22 nt, Artificial Sequence
  LDLR targeting guide sequence portion
ccccagggacaaaacacugugu

SEQ ID NO: 8433 - RNA, 22 nt, Artificial Sequence
  LDLR targeting guide sequence portion
ccccagugcagggaaccgugau

SEQ ID NO: 8434 - RNA, 22 nt, Artificial Sequence
  LDLR targeting guide sequence portion
ccccaucucuuaaaaaaugaau

SEQ ID NO: 8435 - RNA, 22 nt, Artificial Sequence
  LDLR targeting guide sequence portion
cccccagugcagggaaccguga

SEQ ID NO: 8436 - RNA, 22 nt, Artificial Sequence
  LDLR targeting guide sequence portion
ccccccagugcagggaaccgug

SEQ ID NO: 8437 - RNA, 22 nt, Artificial Sequence
  LDLR targeting guide sequence portion
ccccccgggccuguuucucuua

SEQ ID NO: 8438 - RNA, 22 nt, Artificial Sequence
  LDLR targeting guide sequence portion
cccccgaaucaugacccaccca

SEQ ID NO: 8439 - RNA, 22 nt, Artificial Sequence
  LDLR targeting guide sequence portion
cccccgggccuguuucucuuau

SEQ ID NO: 8440 - RNA, 22 nt, Artificial Sequence
  LDLR targeting guide sequence portion
cccccuacacagggccccgaga

SEQ ID NO: 8441 - RNA, 22 nt, Artificial Sequence
  LDLR targeting guide sequence portion
cccccuggcccugccucaucca

SEQ ID NO: 8442 - RNA, 22 nt, Artificial Sequence
  LDLR targeting guide sequence portion
ccccgaaucaugacccacccag

SEQ ID NO: 8443 - RNA, 22 nt, Artificial Sequence
  LDLR targeting guide sequence portion
ccccgagaauagucacugaaca

SEQ ID NO: 8444 - RNA, 22 nt, Artificial Sequence
  LDLR targeting guide sequence portion
ccccggcauucauugacacggg

SEQ ID NO: 8445 - RNA, 22 nt, Artificial Sequence
  LDLR targeting guide sequence portion
ccccgggccuguuucucuuauc

SEQ ID NO: 8446 - RNA, 22 nt, Artificial Sequence
  LDLR targeting guide sequence portion
ccccguuguauguaugaguggc

SEQ ID NO: 8447 - RNA, 22 nt, Artificial Sequence
  LDLR targeting guide sequence portion
ccccuaaacucaggagucaacg

SEQ ID NO: 8448 - RNA, 22 nt, Artificial Sequence
  LDLR targeting guide sequence portion
ccccuacacagggccccgagaa

SEQ ID NO: 8449 - RNA, 22 nt, Artificial Sequence
  LDLR targeting guide sequence portion
ccccuacccacuuccauucccg

SEQ ID NO: 8450 - RNA, 22 nt, Artificial Sequence
  LDLR targeting guide sequence portion
ccccuccccuuucaucuuccau

SEQ ID NO: 8451 - RNA, 22 nt, Artificial Sequence
  LDLR targeting guide sequence portion
ccccucucuguccccggcauuc

SEQ ID NO: 8452 - RNA, 22 nt, Artificial Sequence
  LDLR targeting guide sequence portion
ccccuggcccugccucauccac

SEQ ID NO: 8453 - RNA, 22 nt, Artificial Sequence
  LDLR targeting guide sequence portion
ccccuuucaucuuccauguuug

SEQ ID NO: 8454 - RNA, 22 nt, Artificial Sequence
  LDLR targeting guide sequence portion
cccgaaucaugacccacccagu

SEQ ID NO: 8455 - RNA, 22 nt, Artificial Sequence
  LDLR targeting guide sequence portion
cccgaccccuacccacuuccau

SEQ ID NO: 8456 - RNA, 22 nt, Artificial Sequence
  LDLR targeting guide sequence portion
cccgagaauagucacugaacaa

SEQ ID NO: 8457 - RNA, 22 nt, Artificial Sequence
  LDLR targeting guide sequence portion
cccgcgugaagaugucacaagg

SEQ ID NO: 8458 - RNA, 22 nt, Artificial Sequence
  LDLR targeting guide sequence portion
cccggcauucauugacacgggc

SEQ ID NO: 8459 - RNA, 22 nt, Artificial Sequence
  LDLR targeting guide sequence portion
cccggccucaccgugcauguuu

SEQ ID NO: 8460 - RNA, 22 nt, Artificial Sequence
  LDLR targeting guide sequence portion
cccgggccuguuucucuuaucc

SEQ ID NO: 8461 - RNA, 22 nt, Artificial Sequence
  LDLR targeting guide sequence portion
cccggggggaccaggaugacac

SEQ ID NO: 8462 - RNA, 22 nt, Artificial Sequence
  LDLR targeting guide sequence portion
cccggucaaccugccccucucu

SEQ ID NO: 8463 - RNA, 22 nt, Artificial Sequence
  LDLR targeting guide sequence portion
cccgguuaccuuggccgugagg

SEQ ID NO: 8464 - RNA, 22 nt, Artificial Sequence
  LDLR targeting guide sequence portion
cccgucaaacgauccagacugg

SEQ ID NO: 8465 - RNA, 22 nt, Artificial Sequence
  LDLR targeting guide sequence portion
cccgucccugcccagaacccuu

SEQ ID NO: 8466 - RNA, 22 nt, Artificial Sequence
  LDLR targeting guide sequence portion
cccguggucuccuugcacuuuc

SEQ ID NO: 8467 - RNA, 22 nt, Artificial Sequence
  LDLR targeting guide sequence portion
cccgugucaaugaaugccgggg

SEQ ID NO: 8468 - RNA, 22 nt, Artificial Sequence
  LDLR targeting guide sequence portion
cccguuggugccaucugcuguu

SEQ ID NO: 8469 - RNA, 22 nt, Artificial Sequence
  LDLR targeting guide sequence portion
cccguuguauguaugaguggcu

SEQ ID NO: 8470 - RNA, 22 nt, Artificial Sequence
  LDLR targeting guide sequence portion
cccuaaacucaggagucaacgu

SEQ ID NO: 8471 - RNA, 22 nt, Artificial Sequence
  LDLR targeting guide sequence portion
cccuacacagggccccgagaau

SEQ ID NO: 8472 - RNA, 22 nt, Artificial Sequence
  LDLR targeting guide sequence portion
cccuacccacuuccauucccgu

SEQ ID NO: 8473 - RNA, 22 nt, Artificial Sequence
  LDLR targeting guide sequence portion
cccuccccuuucaucuuccaug

SEQ ID NO: 8474 - RNA, 22 nt, Artificial Sequence
  LDLR targeting guide sequence portion
cccucucuguccccggcauuca

SEQ ID NO: 8475 - RNA, 22 nt, Artificial Sequence
  LDLR targeting guide sequence portion
cccugcccagaacccuuccuga

SEQ ID NO: 8476 - RNA, 22 nt, Artificial Sequence
  LDLR targeting guide sequence portion
cccugccucauccaccaaucuc

SEQ ID NO: 8477 - RNA, 22 nt, Artificial Sequence
  LDLR targeting guide sequence portion
cccuggcccugccucauccacc

SEQ ID NO: 8478 - RNA, 22 nt, Artificial Sequence
  LDLR targeting guide sequence portion
cccuggccugggaucccauccc

SEQ ID NO: 8479 - RNA, 22 nt, Artificial Sequence
  LDLR targeting guide sequence portion
cccuggggacaauugccaaucc

SEQ ID NO: 8480 - RNA, 22 nt, Artificial Sequence
  LDLR targeting guide sequence portion
cccugguugcuguauuuguuca

SEQ ID NO: 8481 - RNA, 22 nt, Artificial Sequence
  LDLR targeting guide sequence portion
cccuguacagauaguggggauu

SEQ ID NO: 8482 - RNA, 22 nt, Artificial Sequence
  LDLR targeting guide sequence portion
cccugucacccccgaaucauga

SEQ ID NO: 8483 - RNA, 22 nt, Artificial Sequence
  LDLR targeting guide sequence portion
cccuguguaggggguuauugcc

SEQ ID NO: 8484 - RNA, 22 nt, Artificial Sequence
  LDLR targeting guide sequence portion
cccuuaauauuuauuaagugcc

SEQ ID NO: 8485 - RNA, 22 nt, Artificial Sequence
  LDLR targeting guide sequence portion
cccuuccugagaccucgccggc

SEQ ID NO: 8486 - RNA, 22 nt, Artificial Sequence
  LDLR targeting guide sequence portion
cccuugugacaucuucacgcgg

SEQ ID NO: 8487 - RNA, 22 nt, Artificial Sequence
  LDLR targeting guide sequence portion
cccuuucaucuuccauguuuga

SEQ ID NO: 8488 - RNA, 22 nt, Artificial Sequence
  LDLR targeting guide sequence portion
cccuuuccuggcuuaaggaagg

SEQ ID NO: 8489 - RNA, 22 nt, Artificial Sequence
  LDLR targeting guide sequence portion
ccgaaaccagaaaggcuuauca

SEQ ID NO: 8490 - RNA, 22 nt, Artificial Sequence
  LDLR targeting guide sequence portion
ccgaagccuguucugccuccca

SEQ ID NO: 8491 - RNA, 22 nt, Artificial Sequence
  LDLR targeting guide sequence portion
ccgaaucaugacccacccagug

SEQ ID NO: 8492 - RNA, 22 nt, Artificial Sequence
  LDLR targeting guide sequence portion
ccgaccccuacccacuuccauu

SEQ ID NO: 8493 - RNA, 22 nt, Artificial Sequence
  LDLR targeting guide sequence portion
ccgacgccaugaaucccuuucc

SEQ ID NO: 8494 - RNA, 22 nt, Artificial Sequence
  LDLR targeting guide sequence portion
ccgagaauagucacugaacaaa

SEQ ID NO: 8495 - RNA, 22 nt, Artificial Sequence
  LDLR targeting guide sequence portion
ccgagaccaaacucauucacca

SEQ ID NO: 8496 - RNA, 22 nt, Artificial Sequence
  LDLR targeting guide sequence portion
ccgcccaccuagugcuuccacu

SEQ ID NO: 8497 - RNA, 22 nt, Artificial Sequence
  LDLR targeting guide sequence portion
ccgcgugaagaugucacaaggg

SEQ ID NO: 8498 - RNA, 22 nt, Artificial Sequence
  LDLR targeting guide sequence portion
ccggacaucagugcaacaguaa

SEQ ID NO: 8499 - RNA, 22 nt, Artificial Sequence
  LDLR targeting guide sequence portion
ccggagagacagugacagccuc

SEQ ID NO: 8500 - RNA, 22 nt, Artificial Sequence
  LDLR targeting guide sequence portion
ccggcauucauugacacgggcu

SEQ ID NO: 8501 - RNA, 22 nt, Artificial Sequence
  LDLR targeting guide sequence portion
ccggccucaccgugcauguuuu

SEQ ID NO: 8502 - RNA, 22 nt, Artificial Sequence
  LDLR targeting guide sequence portion
ccggccuuguuuuauucaaaga

SEQ ID NO: 8503 - RNA, 22 nt, Artificial Sequence
  LDLR targeting guide sequence portion
ccggcgaggucucaggaagggu

SEQ ID NO: 8504 - RNA, 22 nt, Artificial Sequence
  LDLR targeting guide sequence portion
ccgggacuucaaagccgugauc

SEQ ID NO: 8505 - RNA, 22 nt, Artificial Sequence
  LDLR targeting guide sequence portion
ccgggccuguuucucuuauccu

SEQ ID NO: 8506 - RNA, 22 nt, Artificial Sequence
  LDLR targeting guide sequence portion
ccggggacagagaggggcaggu

SEQ ID NO: 8507 - RNA, 22 nt, Artificial Sequence
  LDLR targeting guide sequence portion
ccggggggaccaggaugacacc

SEQ ID NO: 8508 - RNA, 22 nt, Artificial Sequence
  LDLR targeting guide sequence portion
ccgggugucucaggcacuuaau

SEQ ID NO: 8509 - RNA, 22 nt, Artificial Sequence
  LDLR targeting guide sequence portion
ccggucaaccugccccucucug

SEQ ID NO: 8510 - RNA, 22 nt, Artificial Sequence
  LDLR targeting guide sequence portion
ccgguuaccuuggccgugagga

SEQ ID NO: 8511 - RNA, 22 nt, Artificial Sequence
  LDLR targeting guide sequence portion
ccguacccagcugauuuuuaac

SEQ ID NO: 8512 - RNA, 22 nt, Artificial Sequence
  LDLR targeting guide sequence portion
ccgucaaacgauccagacugga

SEQ ID NO: 8513 - RNA, 22 nt, Artificial Sequence
  LDLR targeting guide sequence portion
ccgucagacucccgcgugaaga

SEQ ID NO: 8514 - RNA, 22 nt, Artificial Sequence
  LDLR targeting guide sequence portion
ccgucccugcccagaacccuuc

SEQ ID NO: 8515 - RNA, 22 nt, Artificial Sequence
  LDLR targeting guide sequence portion
ccgugacacaauccucaaacau

SEQ ID NO: 8516 - RNA, 22 nt, Artificial Sequence
  LDLR targeting guide sequence portion
ccgugaggacacguggccugca

SEQ ID NO: 8517 - RNA, 22 nt, Artificial Sequence
  LDLR targeting guide sequence portion
ccgugauaagccuuucugguuu

SEQ ID NO: 8518 - RNA, 22 nt, Artificial Sequence
  LDLR targeting guide sequence portion
ccgugaucgugaauaucgagaa

SEQ ID NO: 8519 - RNA, 22 nt, Artificial Sequence
  LDLR targeting guide sequence portion
ccgugcauguuuuaaacacaua

SEQ ID NO: 8520 - RNA, 22 nt, Artificial Sequence
  LDLR targeting guide sequence portion
ccguggucuccuugcacuuucu

SEQ ID NO: 8521 - RNA, 22 nt, Artificial Sequence
  LDLR targeting guide sequence portion
ccgugguggcaccgagaccaaa

SEQ ID NO: 8522 - RNA, 22 nt, Artificial Sequence
  LDLR targeting guide sequence portion
ccgugucaaugaaugccgggga

SEQ ID NO: 8523 - RNA, 22 nt, Artificial Sequence
  LDLR targeting guide sequence portion
ccguguuacuguugcacugaug

SEQ ID NO: 8524 - RNA, 22 nt, Artificial Sequence
  LDLR targeting guide sequence portion
ccguuggugccaucugcuguug

SEQ ID NO: 8525 - RNA, 22 nt, Artificial Sequence
  LDLR targeting guide sequence portion
ccguuguauguaugaguggcuu

SEQ ID NO: 8526 - RNA, 22 nt, Artificial Sequence
  LDLR targeting guide sequence portion
ccuaaacucaggagucaacgug

SEQ ID NO: 8527 - RNA, 22 nt, Artificial Sequence
  LDLR targeting guide sequence portion
ccuacacagggccccgagaaua

SEQ ID NO: 8528 - RNA, 22 nt, Artificial Sequence
  LDLR targeting guide sequence portion
ccuacccacuuccauucccgug

SEQ ID NO: 8529 - RNA, 22 nt, Artificial Sequence
  LDLR targeting guide sequence portion
ccuagugcuuccacuucuaugc

SEQ ID NO: 8530 - RNA, 22 nt, Artificial Sequence
  LDLR targeting guide sequence portion
ccucaaacauggaagaugaaag

SEQ ID NO: 8531 - RNA, 22 nt, Artificial Sequence
  LDLR targeting guide sequence portion
ccucaaaugccugagcucaaac

SEQ ID NO: 8532 - RNA, 22 nt, Artificial Sequence
  LDLR targeting guide sequence portion
ccucaccgugcauguuuuaaac

SEQ ID NO: 8533 - RNA, 22 nt, Artificial Sequence
  LDLR targeting guide sequence portion
ccucacggccaagguaaccggg

SEQ ID NO: 8534 - RNA, 22 nt, Artificial Sequence
  LDLR targeting guide sequence portion
ccucagccucgccaugccuggc

SEQ ID NO: 8535 - RNA, 22 nt, Artificial Sequence
  LDLR targeting guide sequence portion
ccucauccaccaaucucuaagc

SEQ ID NO: 8536 - RNA, 22 nt, Artificial Sequence
  LDLR targeting guide sequence portion
ccuccaagccauucacuucccc

SEQ ID NO: 8537 - RNA, 22 nt, Artificial Sequence
  LDLR targeting guide sequence portion
ccuccagucuggaucguuugac

SEQ ID NO: 8538 - RNA, 22 nt, Artificial Sequence
  LDLR targeting guide sequence portion
ccuccauuucucuccaggaagu

SEQ ID NO: 8539 - RNA, 22 nt, Artificial Sequence
  LDLR targeting guide sequence portion
ccucccaccucagccucgccau

SEQ ID NO: 8540 - RNA, 22 nt, Artificial Sequence
  LDLR targeting guide sequence portion
ccuccccuuucaucuuccaugu

SEQ ID NO: 8541 - RNA, 22 nt, Artificial Sequence
  LDLR targeting guide sequence portion
ccucccgaccccuacccacuuc

SEQ ID NO: 8542 - RNA, 22 nt, Artificial Sequence
  LDLR targeting guide sequence portion
ccuccgucagacucccgcguga

SEQ ID NO: 8543 - RNA, 22 nt, Artificial Sequence
  LDLR targeting guide sequence portion
ccucgaaagacacugggugggu

SEQ ID NO: 8544 - RNA, 22 nt, Artificial Sequence
  LDLR targeting guide sequence portion
ccucgccaugccuggccagagg

SEQ ID NO: 8545 - RNA, 22 nt, Artificial Sequence
  LDLR targeting guide sequence portion
ccucgccggccuuguuuuauuc

SEQ ID NO: 8546 - RNA, 22 nt, Artificial Sequence
  LDLR targeting guide sequence portion
ccucgugaaggauaagagaaac

SEQ ID NO: 8547 - RNA, 22 nt, Artificial Sequence
  LDLR targeting guide sequence portion
ccucucuguccccggcauucau

SEQ ID NO: 8548 - RNA, 22 nt, Artificial Sequence
  LDLR targeting guide sequence portion
ccucugaaaugccucuucuuua

SEQ ID NO: 8549 - RNA, 22 nt, Artificial Sequence
  LDLR targeting guide sequence portion
ccucuggccaggcauggcgagg

SEQ ID NO: 8550 - RNA, 22 nt, Artificial Sequence
  LDLR targeting guide sequence portion
ccucugggaaguggcaucauuu

SEQ ID NO: 8551 - RNA, 22 nt, Artificial Sequence
  LDLR targeting guide sequence portion
ccucuucuaugcaagccuugcu

SEQ ID NO: 8552 - RNA, 22 nt, Artificial Sequence
  LDLR targeting guide sequence portion
ccugaacucaagugauccagcu

SEQ ID NO: 8553 - RNA, 22 nt, Artificial Sequence
  LDLR targeting guide sequence portion
ccugaagucccgucaaacgauc

SEQ ID NO: 8554 - RNA, 22 nt, Artificial Sequence
  LDLR targeting guide sequence portion
ccugaaugucuuacugugauca

SEQ ID NO: 8555 - RNA, 22 nt, Artificial Sequence
  LDLR targeting guide sequence portion
ccugacagccacaccugggugc

SEQ ID NO: 8556 - RNA, 22 nt, Artificial Sequence
  LDLR targeting guide sequence portion
ccugacauccccuccccuuuca

SEQ ID NO: 8557 - RNA, 22 nt, Artificial Sequence
  LDLR targeting guide sequence portion
ccugagacacccgguuaccuug

SEQ ID NO: 8558 - RNA, 22 nt, Artificial Sequence
  LDLR targeting guide sequence portion
ccugagaccucgccggccuugu

SEQ ID NO: 8559 - RNA, 22 nt, Artificial Sequence
  LDLR targeting guide sequence portion
ccugagcaacaaagcgagaucc

SEQ ID NO: 8560 - RNA, 22 nt, Artificial Sequence
  LDLR targeting guide sequence portion
ccugagucacuggucacccuua

SEQ ID NO: 8561 - RNA, 22 nt, Artificial Sequence
  LDLR targeting guide sequence portion
ccugaguuuagggguuuggcuu

SEQ ID NO: 8562 - RNA, 22 nt, Artificial Sequence
  LDLR targeting guide sequence portion
ccugcacccagguguggcuguc

SEQ ID NO: 8563 - RNA, 22 nt, Artificial Sequence
  LDLR targeting guide sequence portion
ccugccagagcuuuguuuuaua

SEQ ID NO: 8564 - RNA, 22 nt, Artificial Sequence
  LDLR targeting guide sequence portion
ccugcccagaacccuuccugag

SEQ ID NO: 8565 - RNA, 22 nt, Artificial Sequence
  LDLR targeting guide sequence portion
ccugccccucucuguccccggc

SEQ ID NO: 8566 - RNA, 22 nt, Artificial Sequence
  LDLR targeting guide sequence portion
ccugccucauccaccaaucucu

SEQ ID NO: 8567 - RNA, 22 nt, Artificial Sequence
  LDLR targeting guide sequence portion
ccuggagagaaauggagguguc

SEQ ID NO: 8568 - RNA, 22 nt, Artificial Sequence
  LDLR targeting guide sequence portion
ccuggagucccgucccugccca

SEQ ID NO: 8569 - RNA, 22 nt, Artificial Sequence
  LDLR targeting guide sequence portion
ccuggccagaggccaugggcug

SEQ ID NO: 8570 - RNA, 22 nt, Artificial Sequence
  LDLR targeting guide sequence portion
ccuggcccugccucauccacca

SEQ ID NO: 8571 - RNA, 22 nt, Artificial Sequence
  LDLR targeting guide sequence portion
ccuggccugggaucccauccca

SEQ ID NO: 8572 - RNA, 22 nt, Artificial Sequence
  LDLR targeting guide sequence portion
ccuggcugucuagcaaggcuug

SEQ ID NO: 8573 - RNA, 22 nt, Artificial Sequence
  LDLR targeting guide sequence portion
ccuggcuuaaggaagguacaaa

SEQ ID NO: 8574 - RNA, 22 nt, Artificial Sequence
  LDLR targeting guide sequence portion
ccugggaucccaucccaacaca

SEQ ID NO: 8575 - RNA, 22 nt, Artificial Sequence
  LDLR targeting guide sequence portion
ccuggggacaauugccaauccc

SEQ ID NO: 8576 - RNA, 22 nt, Artificial Sequence
  LDLR targeting guide sequence portion
ccugggugcaggccacgugucc

SEQ ID NO: 8577 - RNA, 22 nt, Artificial Sequence
  LDLR targeting guide sequence portion
ccugguccccccgggccuguuu

SEQ ID NO: 8578 - RNA, 22 nt, Artificial Sequence
  LDLR targeting guide sequence portion
ccuggugcccauccucccgacc

SEQ ID NO: 8579 - RNA, 22 nt, Artificial Sequence
  LDLR targeting guide sequence portion
ccugguugcuguauuuguucag

SEQ ID NO: 8580 - RNA, 22 nt, Artificial Sequence
  LDLR targeting guide sequence portion
ccuguacagauaguggggauuu

SEQ ID NO: 8581 - RNA, 22 nt, Artificial Sequence
  LDLR targeting guide sequence portion
ccugucacccccgaaucaugac

SEQ ID NO: 8582 - RNA, 22 nt, Artificial Sequence
  LDLR targeting guide sequence portion
ccuguguaggggguuauugccu

SEQ ID NO: 8583 - RNA, 22 nt, Artificial Sequence
  LDLR targeting guide sequence portion
ccugugucuggccaaauucauu

SEQ ID NO: 8584 - RNA, 22 nt, Artificial Sequence
  LDLR targeting guide sequence portion
ccuguucugccucccagaugaa

SEQ ID NO: 8585 - RNA, 22 nt, Artificial Sequence
  LDLR targeting guide sequence portion
ccuguuucucuuauccuucacg

SEQ ID NO: 8586 - RNA, 22 nt, Artificial Sequence
  LDLR targeting guide sequence portion
ccuuaagccaggaaagggauuc

SEQ ID NO: 8587 - RNA, 22 nt, Artificial Sequence
  LDLR targeting guide sequence portion
ccuuaauauuuauuaagugccu

SEQ ID NO: 8588 - RNA, 22 nt, Artificial Sequence
  LDLR targeting guide sequence portion
ccuucacgaggaaaggaagaaa

SEQ ID NO: 8589 - RNA, 22 nt, Artificial Sequence
  LDLR targeting guide sequence portion
ccuuccugagaccucgccggcc

SEQ ID NO: 8590 - RNA, 22 nt, Artificial Sequence
  LDLR targeting guide sequence portion
ccuuccuuaagccaggaaaggg

SEQ ID NO: 8591 - RNA, 22 nt, Artificial Sequence
  LDLR targeting guide sequence portion
ccuucuauacagugguuuaaaa

SEQ ID NO: 8592 - RNA, 22 nt, Artificial Sequence
  LDLR targeting guide sequence portion
ccuugcacuuucucaguucaga

SEQ ID NO: 8593 - RNA, 22 nt, Artificial Sequence
  LDLR targeting guide sequence portion
ccuugcuagacagccagguuag

SEQ ID NO: 8594 - RNA, 22 nt, Artificial Sequence
  LDLR targeting guide sequence portion
ccuuggccgugaggacacgugg

SEQ ID NO: 8595 - RNA, 22 nt, Artificial Sequence
  LDLR targeting guide sequence portion
ccuugugacaucuucacgcggg

SEQ ID NO: 8596 - RNA, 22 nt, Artificial Sequence
  LDLR targeting guide sequence portion
ccuuguuuuauucaaagacaga

SEQ ID NO: 8597 - RNA, 22 nt, Artificial Sequence
  LDLR targeting guide sequence portion
ccuuucaucuuccauguuugag

SEQ ID NO: 8598 - RNA, 22 nt, Artificial Sequence
  LDLR targeting guide sequence portion
ccuuuccucgugaaggauaaga

SEQ ID NO: 8599 - RNA, 22 nt, Artificial Sequence
  LDLR targeting guide sequence portion
ccuuuccuggcuuaaggaaggu

SEQ ID NO: 8600 - RNA, 22 nt, Artificial Sequence
  LDLR targeting guide sequence portion
ccuuucugguuucggagcacgu

SEQ ID NO: 8601 - RNA, 22 nt, Artificial Sequence
  LDLR targeting guide sequence portion
ccuuugcccugucacccccgaa

SEQ ID NO: 8602 - RNA, 22 nt, Artificial Sequence
  LDLR targeting guide sequence portion
cgaaaccagaaaggcuuaucac

SEQ ID NO: 8603 - RNA, 22 nt, Artificial Sequence
  LDLR targeting guide sequence portion
cgaaagacacugggugggucau

SEQ ID NO: 8604 - RNA, 22 nt, Artificial Sequence
  LDLR targeting guide sequence portion
cgaacuggacugugugcaacgc

SEQ ID NO: 8605 - RNA, 22 nt, Artificial Sequence
  LDLR targeting guide sequence portion
cgaaucaugacccacccagugu

SEQ ID NO: 8606 - RNA, 22 nt, Artificial Sequence
  LDLR targeting guide sequence portion
cgacaagauuggggaagugaau

SEQ ID NO: 8607 - RNA, 22 nt, Artificial Sequence
  LDLR targeting guide sequence portion
cgacaauggcaguucucgauau

SEQ ID NO: 8608 - RNA, 22 nt, Artificial Sequence
  LDLR targeting guide sequence portion
cgacagaaaacagugcaaaaua

SEQ ID NO: 8609 - RNA, 22 nt, Artificial Sequence
  LDLR targeting guide sequence portion
cgacagccucaaaugccugagc

SEQ ID NO: 8610 - RNA, 22 nt, Artificial Sequence
  LDLR targeting guide sequence portion
cgaccccuacccacuuccauuc

SEQ ID NO: 8611 - RNA, 22 nt, Artificial Sequence
  LDLR targeting guide sequence portion
cgacgccaugaaucccuuuccu

SEQ ID NO: 8612 - RNA, 22 nt, Artificial Sequence
  LDLR targeting guide sequence portion
cgagaacugccauugucgucuu

SEQ ID NO: 8613 - RNA, 22 nt, Artificial Sequence
  LDLR targeting guide sequence portion
cgagaauagucacugaacaaau

SEQ ID NO: 8614 - RNA, 22 nt, Artificial Sequence
  LDLR targeting guide sequence portion
cgagaccaaacucauucaccaa

SEQ ID NO: 8615 - RNA, 22 nt, Artificial Sequence
  LDLR targeting guide sequence portion
cgagaucccaucucuacaaaaa

SEQ ID NO: 8616 - RNA, 22 nt, Artificial Sequence
  LDLR targeting guide sequence portion
cgaggaaaggaagaaaccaaaa

SEQ ID NO: 8617 - RNA, 22 nt, Artificial Sequence
  LDLR targeting guide sequence portion
cgaggucucaggaaggguucug

SEQ ID NO: 8618 - RNA, 22 nt, Artificial Sequence
  LDLR targeting guide sequence portion
cgagguggguuuguaccuuccu

SEQ ID NO: 8619 - RNA, 22 nt, Artificial Sequence
  LDLR targeting guide sequence portion
cgauauucacgaucacggcuuu

SEQ ID NO: 8620 - RNA, 22 nt, Artificial Sequence
  LDLR targeting guide sequence portion
cgaucacggcuuugaagucccg

SEQ ID NO: 8621 - RNA, 22 nt, Artificial Sequence
  LDLR targeting guide sequence portion
cgauccagacuggaggauuuau

SEQ ID NO: 8622 - RNA, 22 nt, Artificial Sequence
  LDLR targeting guide sequence portion
cgauuucagaaagaaccugaag

SEQ ID NO: 8623 - RNA, 22 nt, Artificial Sequence
  LDLR targeting guide sequence portion
cgcauuuacgugcuccgaaacc

SEQ ID NO: 8624 - RNA, 22 nt, Artificial Sequence
  LDLR targeting guide sequence portion
cgccacgucauccuccagacug

SEQ ID NO: 8625 - RNA, 22 nt, Artificial Sequence
  LDLR targeting guide sequence portion
cgccaugaaucccuuuccuggc

SEQ ID NO: 8626 - RNA, 22 nt, Artificial Sequence
  LDLR targeting guide sequence portion
cgccaugccuggccagaggcca

SEQ ID NO: 8627 - RNA, 22 nt, Artificial Sequence
  LDLR targeting guide sequence portion
cgcccaccuagugcuuccacuu

SEQ ID NO: 8628 - RNA, 22 nt, Artificial Sequence
  LDLR targeting guide sequence portion
cgcccggccucaccgugcaugu

SEQ ID NO: 8629 - RNA, 22 nt, Artificial Sequence
  LDLR targeting guide sequence portion
cgccggccuuguuuuauucaaa

SEQ ID NO: 8630 - RNA, 22 nt, Artificial Sequence
  LDLR targeting guide sequence portion
cgccguguuacuguugcacuga

SEQ ID NO: 8631 - RNA, 22 nt, Artificial Sequence
  LDLR targeting guide sequence portion
cgcgggagucugacggaggcug

SEQ ID NO: 8632 - RNA, 22 nt, Artificial Sequence
  LDLR targeting guide sequence portion
cgcgugaagaugucacaaggga

SEQ ID NO: 8633 - RNA, 22 nt, Artificial Sequence
  LDLR targeting guide sequence portion
cgcuuuguugcucaggccuggu

SEQ ID NO: 8634 - RNA, 22 nt, Artificial Sequence
  LDLR targeting guide sequence portion
cgcuuuuugggagaaugauguc

SEQ ID NO: 8635 - RNA, 22 nt, Artificial Sequence
  LDLR targeting guide sequence portion
cggaaaugaucuggcugaaucc

SEQ ID NO: 8636 - RNA, 22 nt, Artificial Sequence
  LDLR targeting guide sequence portion
cggacagugcccaugcaauggc

SEQ ID NO: 8637 - RNA, 22 nt, Artificial Sequence
  LDLR targeting guide sequence portion
cggacauaaagacgacaauggc

SEQ ID NO: 8638 - RNA, 22 nt, Artificial Sequence
  LDLR targeting guide sequence portion
cggacaucagugcaacaguaac

SEQ ID NO: 8639 - RNA, 22 nt, Artificial Sequence
  LDLR targeting guide sequence portion
cggagagacagugacagccucc

SEQ ID NO: 8640 - RNA, 22 nt, Artificial Sequence
  LDLR targeting guide sequence portion
cggagcacguaaaugcgucccu

SEQ ID NO: 8641 - RNA, 22 nt, Artificial Sequence
  LDLR targeting guide sequence portion
cggaggcugucacugucucucc

SEQ ID NO: 8642 - RNA, 22 nt, Artificial Sequence
  LDLR targeting guide sequence portion
cggauucagccagaucauuucc

SEQ ID NO: 8643 - RNA, 22 nt, Artificial Sequence
  LDLR targeting guide sequence portion
cggcauucauugacacgggcuu

SEQ ID NO: 8644 - RNA, 22 nt, Artificial Sequence
  LDLR targeting guide sequence portion
cggccaagguaaccgggugucu

SEQ ID NO: 8645 - RNA, 22 nt, Artificial Sequence
  LDLR targeting guide sequence portion
cggccucaccgugcauguuuua

SEQ ID NO: 8646 - RNA, 22 nt, Artificial Sequence
  LDLR targeting guide sequence portion
cggccuuguuuuauucaaagac

SEQ ID NO: 8647 - RNA, 22 nt, Artificial Sequence
  LDLR targeting guide sequence portion
cggcgaggucucaggaaggguu

SEQ ID NO: 8648 - RNA, 22 nt, Artificial Sequence
  LDLR targeting guide sequence portion
cggcgauuucagaaagaaccug

SEQ ID NO: 8649 - RNA, 22 nt, Artificial Sequence
  LDLR targeting guide sequence portion
cggcuuugaagucccggucaac

SEQ ID NO: 8650 - RNA, 22 nt, Artificial Sequence
  LDLR targeting guide sequence portion
cgggaauggaaguggguagggg

SEQ ID NO: 8651 - RNA, 22 nt, Artificial Sequence
  LDLR targeting guide sequence portion
cgggacccccuggcccugccuc

SEQ ID NO: 8652 - RNA, 22 nt, Artificial Sequence
  LDLR targeting guide sequence portion
cgggacuccaggcagauguuca

SEQ ID NO: 8653 - RNA, 22 nt, Artificial Sequence
  LDLR targeting guide sequence portion
cgggacuucaaagccgugaucg

SEQ ID NO: 8654 - RNA, 22 nt, Artificial Sequence
  LDLR targeting guide sequence portion
cgggacuucagguucuuucuga

SEQ ID NO: 8655 - RNA, 22 nt, Artificial Sequence
  LDLR targeting guide sequence portion
cgggaggaugggcaccaggcug

SEQ ID NO: 8656 - RNA, 22 nt, Artificial Sequence
  LDLR targeting guide sequence portion
cgggagucugacggaggcuguc

SEQ ID NO: 8657 - RNA, 22 nt, Artificial Sequence
  LDLR targeting guide sequence portion
cgggccuguuucucuuauccuu

SEQ ID NO: 8658 - RNA, 22 nt, Artificial Sequence
  LDLR targeting guide sequence portion
cgggcuuucccuggccugggau

SEQ ID NO: 8659 - RNA, 22 nt, Artificial Sequence
  LDLR targeting guide sequence portion
cggggacagagaggggcagguu

SEQ ID NO: 8660 - RNA, 22 nt, Artificial Sequence
  LDLR targeting guide sequence portion
cggggacaucauucucccaaaa

SEQ ID NO: 8661 - RNA, 22 nt, Artificial Sequence
  LDLR targeting guide sequence portion
cggggcccuguguaggggguua

SEQ ID NO: 8662 - RNA, 22 nt, Artificial Sequence
  LDLR targeting guide sequence portion
cggggggaccaggaugacaccu

SEQ ID NO: 8663 - RNA, 22 nt, Artificial Sequence
  LDLR targeting guide sequence portion
cgggggugacagggcaaaggcu

SEQ ID NO: 8664 - RNA, 22 nt, Artificial Sequence
  LDLR targeting guide sequence portion
cgggugucucaggcacuuaaua

SEQ ID NO: 8665 - RNA, 22 nt, Artificial Sequence
  LDLR targeting guide sequence portion
cggucaaccugccccucucugu

SEQ ID NO: 8666 - RNA, 22 nt, Artificial Sequence
  LDLR targeting guide sequence portion
cggugaggccgggcgcaguggc

SEQ ID NO: 8667 - RNA, 22 nt, Artificial Sequence
  LDLR targeting guide sequence portion
cggugccaccacggauucagcc

SEQ ID NO: 8668 - RNA, 22 nt, Artificial Sequence
  LDLR targeting guide sequence portion
cgguggagagaaacucaaaacu

SEQ ID NO: 8669 - RNA, 22 nt, Artificial Sequence
  LDLR targeting guide sequence portion
cgguuaccuuggccgugaggac

SEQ ID NO: 8670 - RNA, 22 nt, Artificial Sequence
  LDLR targeting guide sequence portion
cguaaaugcgucccuguacaga

SEQ ID NO: 8671 - RNA, 22 nt, Artificial Sequence
  LDLR targeting guide sequence portion
cguacccagcugauuuuuaacu

SEQ ID NO: 8672 - RNA, 22 nt, Artificial Sequence
  LDLR targeting guide sequence portion
cgucaaacgauccagacuggag

SEQ ID NO: 8673 - RNA, 22 nt, Artificial Sequence
  LDLR targeting guide sequence portion
cgucagacucccgcgugaagau

SEQ ID NO: 8674 - RNA, 22 nt, Artificial Sequence
  LDLR targeting guide sequence portion
cgucauccuccagacugaccau

SEQ ID NO: 8675 - RNA, 22 nt, Artificial Sequence
  LDLR targeting guide sequence portion
cgucccugcccagaacccuucc

SEQ ID NO: 8676 - RNA, 22 nt, Artificial Sequence
  LDLR targeting guide sequence portion
cgucccuguacagauagugggg

SEQ ID NO: 8677 - RNA, 22 nt, Artificial Sequence
  LDLR targeting guide sequence portion
cgucggaaaugaucuggcugaa

SEQ ID NO: 8678 - RNA, 22 nt, Artificial Sequence
  LDLR targeting guide sequence portion
cgucuuuauguccgcccaccua

SEQ ID NO: 8679 - RNA, 22 nt, Artificial Sequence
  LDLR targeting guide sequence portion
cgugaacaucugccuggagucc

SEQ ID NO: 8680 - RNA, 22 nt, Artificial Sequence
  LDLR targeting guide sequence portion
cgugaagaugucacaagggauu

SEQ ID NO: 8681 - RNA, 22 nt, Artificial Sequence
  LDLR targeting guide sequence portion
cgugaaggauaagagaaacagg

SEQ ID NO: 8682 - RNA, 22 nt, Artificial Sequence
  LDLR targeting guide sequence portion
cgugaauaucgagaacugccau

SEQ ID NO: 8683 - RNA, 22 nt, Artificial Sequence
  LDLR targeting guide sequence portion
cgugacacaauccucaaacaug

SEQ ID NO: 8684 - RNA, 22 nt, Artificial Sequence
  LDLR targeting guide sequence portion
cgugagccacugcgcccggccu

SEQ ID NO: 8685 - RNA, 22 nt, Artificial Sequence
  LDLR targeting guide sequence portion
cgugagcuaugauuaugccacu

SEQ ID NO: 8686 - RNA, 22 nt, Artificial Sequence
  LDLR targeting guide sequence portion
cgugaggacacguggccugcac

SEQ ID NO: 8687 - RNA, 22 nt, Artificial Sequence
  LDLR targeting guide sequence portion
cgugaggcaccugugucuggcc

SEQ ID NO: 8688 - RNA, 22 nt, Artificial Sequence
  LDLR targeting guide sequence portion
cgugauaagccuuucugguuuc

SEQ ID NO: 8689 - RNA, 22 nt, Artificial Sequence
  LDLR targeting guide sequence portion
cgugaucgugaauaucgagaac

SEQ ID NO: 8690 - RNA, 22 nt, Artificial Sequence
  LDLR targeting guide sequence portion
cgugcauguuuuaaacacauac

SEQ ID NO: 8691 - RNA, 22 nt, Artificial Sequence
  LDLR targeting guide sequence portion
cgugccaccguacccagcugau

SEQ ID NO: 8692 - RNA, 22 nt, Artificial Sequence
  LDLR targeting guide sequence portion
cgugcuccgaaaccagaaaggc

SEQ ID NO: 8693 - RNA, 22 nt, Artificial Sequence
  LDLR targeting guide sequence portion
cguggccugcacccaggugugg

SEQ ID NO: 8694 - RNA, 22 nt, Artificial Sequence
  LDLR targeting guide sequence portion
cguggcgugaacaucugccugg

SEQ ID NO: 8695 - RNA, 22 nt, Artificial Sequence
  LDLR targeting guide sequence portion
cguggucuccuugcacuuucuc

SEQ ID NO: 8696 - RNA, 22 nt, Artificial Sequence
  LDLR targeting guide sequence portion
cgugguggcaccgagaccaaac

SEQ ID NO: 8697 - RNA, 22 nt, Artificial Sequence
  LDLR targeting guide sequence portion
cgugucaaugaaugccggggac

SEQ ID NO: 8698 - RNA, 22 nt, Artificial Sequence
  LDLR targeting guide sequence portion
cguguccucacggccaagguaa

SEQ ID NO: 8699 - RNA, 22 nt, Artificial Sequence
  LDLR targeting guide sequence portion
cguguguguugggaugggaucc

SEQ ID NO: 8700 - RNA, 22 nt, Artificial Sequence
  LDLR targeting guide sequence portion
cguguuacuguugcacugaugu

SEQ ID NO: 8701 - RNA, 22 nt, Artificial Sequence
  LDLR targeting guide sequence portion
cguguuuaccucuucuaugcaa

SEQ ID NO: 8702 - RNA, 22 nt, Artificial Sequence
  LDLR targeting guide sequence portion
cguugacuccugaguuuagggg

SEQ ID NO: 8703 - RNA, 22 nt, Artificial Sequence
  LDLR targeting guide sequence portion
cguugauggguauguguuuaaa

SEQ ID NO: 8704 - RNA, 22 nt, Artificial Sequence
  LDLR targeting guide sequence portion
cguugcacacaguccaguucgu

SEQ ID NO: 8705 - RNA, 22 nt, Artificial Sequence
  LDLR targeting guide sequence portion
cguuggugccaucugcuguugu

SEQ ID NO: 8706 - RNA, 22 nt, Artificial Sequence
  LDLR targeting guide sequence portion
cguuguauguaugaguggcuuc

SEQ ID NO: 8707 - RNA, 22 nt, Artificial Sequence
  LDLR targeting guide sequence portion
cguuugacgggacuucagguuc

SEQ ID NO: 8708 - RNA, 22 nt, Artificial Sequence
  LDLR targeting guide sequence portion
cuaaacucaggagucaacgugu

SEQ ID NO: 8709 - RNA, 22 nt, Artificial Sequence
  LDLR targeting guide sequence portion
cuaaccuggcugucuagcaagg

SEQ ID NO: 8710 - RNA, 22 nt, Artificial Sequence
  LDLR targeting guide sequence portion
cuaagccaaaccccuaaacuca

SEQ ID NO: 8711 - RNA, 22 nt, Artificial Sequence
  LDLR targeting guide sequence portion
cuacaaaaaccuucuauacagu

SEQ ID NO: 8712 - RNA, 22 nt, Artificial Sequence
  LDLR targeting guide sequence portion
cuacacagggccccgagaauag

SEQ ID NO: 8713 - RNA, 22 nt, Artificial Sequence
  LDLR targeting guide sequence portion
cuacccacuuccauucccgugg

SEQ ID NO: 8714 - RNA, 22 nt, Artificial Sequence
  LDLR targeting guide sequence portion
cuagacagccagguuagccuuu

SEQ ID NO: 8715 - RNA, 22 nt, Artificial Sequence
  LDLR targeting guide sequence portion
cuagcaaggcuugcauagaaga

SEQ ID NO: 8716 - RNA, 22 nt, Artificial Sequence
  LDLR targeting guide sequence portion
cuaggugggcggacauaaagac

SEQ ID NO: 8717 - RNA, 22 nt, Artificial Sequence
  LDLR targeting guide sequence portion
cuagugcuuccacuucuaugca

SEQ ID NO: 8718 - RNA, 22 nt, Artificial Sequence
  LDLR targeting guide sequence portion
cuauacagugguuuaaaaagug

SEQ ID NO: 8719 - RNA, 22 nt, Artificial Sequence
  LDLR targeting guide sequence portion
cuaucuguacagggacgcauuu

SEQ ID NO: 8720 - RNA, 22 nt, Artificial Sequence
  LDLR targeting guide sequence portion
cuaugauuaugccacugcuuuc

SEQ ID NO: 8721 - RNA, 22 nt, Artificial Sequence
  LDLR targeting guide sequence portion
cuaugcaaaugccuccaagcca

SEQ ID NO: 8722 - RNA, 22 nt, Artificial Sequence
  LDLR targeting guide sequence portion
cuaugcaagccuugcuagacag

SEQ ID NO: 8723 - RNA, 22 nt, Artificial Sequence
  LDLR targeting guide sequence portion
cuauucucggggcccuguguag

SEQ ID NO: 8724 - RNA, 22 nt, Artificial Sequence
  LDLR targeting guide sequence portion
cuauuuauuuuugcaaacccug

SEQ ID NO: 8725 - RNA, 22 nt, Artificial Sequence
  LDLR targeting guide sequence portion
cucaaaacuuccuggagagaaa

SEQ ID NO: 8726 - RNA, 22 nt, Artificial Sequence
  LDLR targeting guide sequence portion
cucaaacauggaagaugaaagg

SEQ ID NO: 8727 - RNA, 22 nt, Artificial Sequence
  LDLR targeting guide sequence portion
cucaaaugccugagcucaaacc

SEQ ID NO: 8728 - RNA, 22 nt, Artificial Sequence
  LDLR targeting guide sequence portion
cucaagugauccagcucagccu

SEQ ID NO: 8729 - RNA, 22 nt, Artificial Sequence
  LDLR targeting guide sequence portion
cucaccgugcauguuuuaaaca

SEQ ID NO: 8730 - RNA, 22 nt, Artificial Sequence
  LDLR targeting guide sequence portion
cucacgacagccucaaaugccu

SEQ ID NO: 8731 - RNA, 22 nt, Artificial Sequence
  LDLR targeting guide sequence portion
cucacggccaagguaaccgggu

SEQ ID NO: 8732 - RNA, 22 nt, Artificial Sequence
  LDLR targeting guide sequence portion
cucagccucgccaugccuggcc

SEQ ID NO: 8733 - RNA, 22 nt, Artificial Sequence
  LDLR targeting guide sequence portion
cucaggaaggguucugggcagg

SEQ ID NO: 8734 - RNA, 22 nt, Artificial Sequence
  LDLR targeting guide sequence portion
cucaggagucaacguguuuacc

SEQ ID NO: 8735 - RNA, 22 nt, Artificial Sequence
  LDLR targeting guide sequence portion
cucaggcacuuaauaaauauua

SEQ ID NO: 8736 - RNA, 22 nt, Artificial Sequence
  LDLR targeting guide sequence portion
cucaggcauuugaggcugucgu

SEQ ID NO: 8737 - RNA, 22 nt, Artificial Sequence
  LDLR targeting guide sequence portion
cucaggcucugccucugggaag

SEQ ID NO: 8738 - RNA, 22 nt, Artificial Sequence
  LDLR targeting guide sequence portion
cucaguucagaguuguacacug

SEQ ID NO: 8739 - RNA, 22 nt, Artificial Sequence
  LDLR targeting guide sequence portion
cucauacauacaacggggacau

SEQ ID NO: 8740 - RNA, 22 nt, Artificial Sequence
  LDLR targeting guide sequence portion
cucauccaccaaucucuaagcc

SEQ ID NO: 8741 - RNA, 22 nt, Artificial Sequence
  LDLR targeting guide sequence portion
cucauucaccaaaugaugccac

SEQ ID NO: 8742 - RNA, 22 nt, Artificial Sequence
  LDLR targeting guide sequence portion
cuccaacuccugaacucaagug

SEQ ID NO: 8743 - RNA, 22 nt, Artificial Sequence
  LDLR targeting guide sequence portion
cuccaagccauucacuucccca

SEQ ID NO: 8744 - RNA, 22 nt, Artificial Sequence
  LDLR targeting guide sequence portion
cuccaccgugacacaauccuca

SEQ ID NO: 8745 - RNA, 22 nt, Artificial Sequence
  LDLR targeting guide sequence portion
cuccaggaaguuuugaguuucu

SEQ ID NO: 8746 - RNA, 22 nt, Artificial Sequence
  LDLR targeting guide sequence portion
cuccaggcagauguucacgcca

SEQ ID NO: 8747 - RNA, 22 nt, Artificial Sequence
  LDLR targeting guide sequence portion
cuccagucuggaucguuugacg

SEQ ID NO: 8748 - RNA, 22 nt, Artificial Sequence
  LDLR targeting guide sequence portion
cuccauuucucuccaggaaguu

SEQ ID NO: 8749 - RNA, 22 nt, Artificial Sequence
  LDLR targeting guide sequence portion
cucccaaaaagcguugcacaca

SEQ ID NO: 8750 - RNA, 22 nt, Artificial Sequence
  LDLR targeting guide sequence portion
cucccaccucagccucgccaug

SEQ ID NO: 8751 - RNA, 22 nt, Artificial Sequence
  LDLR targeting guide sequence portion
cucccagaagccacucauacau

SEQ ID NO: 8752 - RNA, 22 nt, Artificial Sequence
  LDLR targeting guide sequence portion
cuccccuuucaucuuccauguu

SEQ ID NO: 8753 - RNA, 22 nt, Artificial Sequence
  LDLR targeting guide sequence portion
cucccgaccccuacccacuucc

SEQ ID NO: 8754 - RNA, 22 nt, Artificial Sequence
  LDLR targeting guide sequence portion
cucccgcgugaagaugucacaa

SEQ ID NO: 8755 - RNA, 22 nt, Artificial Sequence
  LDLR targeting guide sequence portion
cuccgaaaccagaaaggcuuau

SEQ ID NO: 8756 - RNA, 22 nt, Artificial Sequence
  LDLR targeting guide sequence portion
cuccggacaucagugcaacagu

SEQ ID NO: 8757 - RNA, 22 nt, Artificial Sequence
  LDLR targeting guide sequence portion
cuccgucagacucccgcgugaa

SEQ ID NO: 8758 - RNA, 22 nt, Artificial Sequence
  LDLR targeting guide sequence portion
cuccugaacucaagugauccag

SEQ ID NO: 8759 - RNA, 22 nt, Artificial Sequence
  LDLR targeting guide sequence portion
cuccugaguuuagggguuuggc

SEQ ID NO: 8760 - RNA, 22 nt, Artificial Sequence
  LDLR targeting guide sequence portion
cuccuugcacuuucucaguuca

SEQ ID NO: 8761 - RNA, 22 nt, Artificial Sequence
  LDLR targeting guide sequence portion
cucgaaagacacuggguggguc

SEQ ID NO: 8762 - RNA, 22 nt, Artificial Sequence
  LDLR targeting guide sequence portion
cucgauauucacgaucacggcu

SEQ ID NO: 8763 - RNA, 22 nt, Artificial Sequence
  LDLR targeting guide sequence portion
cucgaucauggcucacugcaac

SEQ ID NO: 8764 - RNA, 22 nt, Artificial Sequence
  LDLR targeting guide sequence portion
cucgccaugccuggccagaggc

SEQ ID NO: 8765 - RNA, 22 nt, Artificial Sequence
  LDLR targeting guide sequence portion
cucgccggccuuguuuuauuca

SEQ ID NO: 8766 - RNA, 22 nt, Artificial Sequence
  LDLR targeting guide sequence portion
cucgcuuuguugcucaggccug

SEQ ID NO: 8767 - RNA, 22 nt, Artificial Sequence
  LDLR targeting guide sequence portion
cucggggcccuguguagggggu

SEQ ID NO: 8768 - RNA, 22 nt, Artificial Sequence
  LDLR targeting guide sequence portion
cucggugccaccacggauucag

SEQ ID NO: 8769 - RNA, 22 nt, Artificial Sequence
  LDLR targeting guide sequence portion
cucgugaaggauaagagaaaca

SEQ ID NO: 8770 - RNA, 22 nt, Artificial Sequence
  LDLR targeting guide sequence portion
cucuaagccaaaccccuaaacu

SEQ ID NO: 8771 - RNA, 22 nt, Artificial Sequence
  LDLR targeting guide sequence portion
cucuccaccgugacacaauccu

SEQ ID NO: 8772 - RNA, 22 nt, Artificial Sequence
  LDLR targeting guide sequence portion
cucuccaggaaguuuugaguuu

SEQ ID NO: 8773 - RNA, 22 nt, Artificial Sequence
  LDLR targeting guide sequence portion
cucuccggacaucagugcaaca

SEQ ID NO: 8774 - RNA, 22 nt, Artificial Sequence
  LDLR targeting guide sequence portion
cucucuguccccggcauucauu

SEQ ID NO: 8775 - RNA, 22 nt, Artificial Sequence
  LDLR targeting guide sequence portion
cucugaaaugccucuucuuuau

SEQ ID NO: 8776 - RNA, 22 nt, Artificial Sequence
  LDLR targeting guide sequence portion
cucugaacugagaaagugcaag

SEQ ID NO: 8777 - RNA, 22 nt, Artificial Sequence
  LDLR targeting guide sequence portion
cucugccucugggaaguggcau

SEQ ID NO: 8778 - RNA, 22 nt, Artificial Sequence
  LDLR targeting guide sequence portion
cucuggcaggcaaugcuuuggu

SEQ ID NO: 8779 - RNA, 22 nt, Artificial Sequence
  LDLR targeting guide sequence portion
cucuggccaggcauggcgaggc

SEQ ID NO: 8780 - RNA, 22 nt, Artificial Sequence
  LDLR targeting guide sequence portion
cucugggaaguggcaucauuug

SEQ ID NO: 8781 - RNA, 22 nt, Artificial Sequence
  LDLR targeting guide sequence portion
cucugggccugacauccccucc

SEQ ID NO: 8782 - RNA, 22 nt, Artificial Sequence
  LDLR targeting guide sequence portion
cucuguccccggcauucauuga

SEQ ID NO: 8783 - RNA, 22 nt, Artificial Sequence
  LDLR targeting guide sequence portion
cucugucuuugaauaaaacaag

SEQ ID NO: 8784 - RNA, 22 nt, Artificial Sequence
  LDLR targeting guide sequence portion
cucuuaaaaaaugaauuuggcc

SEQ ID NO: 8785 - RNA, 22 nt, Artificial Sequence
  LDLR targeting guide sequence portion
cucuuauccuucacgaggaaag

SEQ ID NO: 8786 - RNA, 22 nt, Artificial Sequence
  LDLR targeting guide sequence portion
cucuucuaugcaagccuugcua

SEQ ID NO: 8787 - RNA, 22 nt, Artificial Sequence
  LDLR targeting guide sequence portion
cugaaauagggucuucaucugu

SEQ ID NO: 8788 - RNA, 22 nt, Artificial Sequence
  LDLR targeting guide sequence portion
cugaaaucgccguguuacuguu

SEQ ID NO: 8789 - RNA, 22 nt, Artificial Sequence
  LDLR targeting guide sequence portion
cugaaaugccucuucuuuaugu

SEQ ID NO: 8790 - RNA, 22 nt, Artificial Sequence
  LDLR targeting guide sequence portion
cugaacaaauacagcaaccagg

SEQ ID NO: 8791 - RNA, 22 nt, Artificial Sequence
  LDLR targeting guide sequence portion
cugaacucaagugauccagcuc

SEQ ID NO: 8792 - RNA, 22 nt, Artificial Sequence
  LDLR targeting guide sequence portion
cugaacugagaaagugcaagga

SEQ ID NO: 8793 - RNA, 22 nt, Artificial Sequence
  LDLR targeting guide sequence portion
cugaagucccgucaaacgaucc

SEQ ID NO: 8794 - RNA, 22 nt, Artificial Sequence
  LDLR targeting guide sequence portion
cugaauccgugguggcaccgag

SEQ ID NO: 8795 - RNA, 22 nt, Artificial Sequence
  LDLR targeting guide sequence portion
cugacagccacaccugggugca

SEQ ID NO: 8796 - RNA, 22 nt, Artificial Sequence
  LDLR targeting guide sequence portion
cugacauccccuccccuuucau

SEQ ID NO: 8797 - RNA, 22 nt, Artificial Sequence
  LDLR targeting guide sequence portion
cugacggaggcugucacugucu

SEQ ID NO: 8798 - RNA, 22 nt, Artificial Sequence
  LDLR targeting guide sequence portion
cugagaaagugcaaggagacca

SEQ ID NO: 8799 - RNA, 22 nt, Artificial Sequence
  LDLR targeting guide sequence portion
cugagacacccgguuaccuugg

SEQ ID NO: 8800 - RNA, 22 nt, Artificial Sequence
  LDLR targeting guide sequence portion
cugagaccucgccggccuuguu

SEQ ID NO: 8801 - RNA, 22 nt, Artificial Sequence
  LDLR targeting guide sequence portion
cugagcaacaaagcgagauccc

SEQ ID NO: 8802 - RNA, 22 nt, Artificial Sequence
  LDLR targeting guide sequence portion
cugagcuggaucacuugaguuc

SEQ ID NO: 8803 - RNA, 22 nt, Artificial Sequence
  LDLR targeting guide sequence portion
cugagucacuggucacccuuaa

SEQ ID NO: 8804 - RNA, 22 nt, Artificial Sequence
  LDLR targeting guide sequence portion
cugaguuuagggguuuggcuua

SEQ ID NO: 8805 - RNA, 22 nt, Artificial Sequence
  LDLR targeting guide sequence portion
cugauguccggagagacaguga

SEQ ID NO: 8806 - RNA, 22 nt, Artificial Sequence
  LDLR targeting guide sequence portion
cugcacccagguguggcuguca

SEQ ID NO: 8807 - RNA, 22 nt, Artificial Sequence
  LDLR targeting guide sequence portion
cugccauugucgucuuuauguc

SEQ ID NO: 8808 - RNA, 22 nt, Artificial Sequence
  LDLR targeting guide sequence portion
cugcccagaacccuuccugaga

SEQ ID NO: 8809 - RNA, 22 nt, Artificial Sequence
  LDLR targeting guide sequence portion
cugccccucucuguccccggca

SEQ ID NO: 8810 - RNA, 22 nt, Artificial Sequence
  LDLR targeting guide sequence portion
cugccucauccaccaaucucua

SEQ ID NO: 8811 - RNA, 22 nt, Artificial Sequence
  LDLR targeting guide sequence portion
cugccucccagaugaauaaaua

SEQ ID NO: 8812 - RNA, 22 nt, Artificial Sequence
  LDLR targeting guide sequence portion
cugccucugggaaguggcauca

SEQ ID NO: 8813 - RNA, 22 nt, Artificial Sequence
  LDLR targeting guide sequence portion
cugccuggagucccgucccugc

SEQ ID NO: 8814 - RNA, 22 nt, Artificial Sequence
  LDLR targeting guide sequence portion
cugcgcccggccucaccgugca

SEQ ID NO: 8815 - RNA, 22 nt, Artificial Sequence
  LDLR targeting guide sequence portion
cugcuguuguguguugaaagcc

SEQ ID NO: 8816 - RNA, 22 nt, Artificial Sequence
  LDLR targeting guide sequence portion
cugcuuuccagccugggcaaca

SEQ ID NO: 8817 - RNA, 22 nt, Artificial Sequence
  LDLR targeting guide sequence portion
cuggaaagcaguggcauaauca

SEQ ID NO: 8818 - RNA, 22 nt, Artificial Sequence
  LDLR targeting guide sequence portion
cuggacugugugcaacgcuuuu

SEQ ID NO: 8819 - RNA, 22 nt, Artificial Sequence
  LDLR targeting guide sequence portion
cuggagagaaauggagguguca

SEQ ID NO: 8820 - RNA, 22 nt, Artificial Sequence
  LDLR targeting guide sequence portion
cuggaggaugacguggcgugaa

SEQ ID NO: 8821 - RNA, 22 nt, Artificial Sequence
  LDLR targeting guide sequence portion
cuggagucccgucccugcccag

SEQ ID NO: 8822 - RNA, 22 nt, Artificial Sequence
  LDLR targeting guide sequence portion
cuggaucacuugaguucaggag

SEQ ID NO: 8823 - RNA, 22 nt, Artificial Sequence
  LDLR targeting guide sequence portion
cuggaucguuugacgggacuuc

SEQ ID NO: 8824 - RNA, 22 nt, Artificial Sequence
  LDLR targeting guide sequence portion
cuggcaggcaaugcuuuggucu

SEQ ID NO: 8825 - RNA, 22 nt, Artificial Sequence
  LDLR targeting guide sequence portion
cuggccaaauucauuuuuuaag

SEQ ID NO: 8826 - RNA, 22 nt, Artificial Sequence
  LDLR targeting guide sequence portion
cuggccagaggccaugggcugc

SEQ ID NO: 8827 - RNA, 22 nt, Artificial Sequence
  LDLR targeting guide sequence portion
cuggccaggcauggcgaggcug

SEQ ID NO: 8828 - RNA, 22 nt, Artificial Sequence
  LDLR targeting guide sequence portion
cuggcccugccucauccaccaa

SEQ ID NO: 8829 - RNA, 22 nt, Artificial Sequence
  LDLR targeting guide sequence portion
cuggccugggaucccaucccaa

SEQ ID NO: 8830 - RNA, 22 nt, Artificial Sequence
  LDLR targeting guide sequence portion
cuggcugaauccgugguggcac

SEQ ID NO: 8831 - RNA, 22 nt, Artificial Sequence
  LDLR targeting guide sequence portion
cuggcugucuagcaaggcuugc

SEQ ID NO: 8832 - RNA, 22 nt, Artificial Sequence
  LDLR targeting guide sequence portion
cuggcuuaaggaagguacaaac

SEQ ID NO: 8833 - RNA, 22 nt, Artificial Sequence
  LDLR targeting guide sequence portion
cugggaaguggcaucauuuggu

SEQ ID NO: 8834 - RNA, 22 nt, Artificial Sequence
  LDLR targeting guide sequence portion
cugggagaugggugucacuuuu

SEQ ID NO: 8835 - RNA, 22 nt, Artificial Sequence
  LDLR targeting guide sequence portion
cugggaggcagaacaggcuucg

SEQ ID NO: 8836 - RNA, 22 nt, Artificial Sequence
  LDLR targeting guide sequence portion
cugggaucccaucccaacacac

SEQ ID NO: 8837 - RNA, 22 nt, Artificial Sequence
  LDLR targeting guide sequence portion
cugggauuacaggcgugaggca

SEQ ID NO: 8838 - RNA, 22 nt, Artificial Sequence
  LDLR targeting guide sequence portion
cugggcagggacgggacuccag

SEQ ID NO: 8839 - RNA, 22 nt, Artificial Sequence
  LDLR targeting guide sequence portion
cugggccugacauccccucccc

SEQ ID NO: 8840 - RNA, 22 nt, Artificial Sequence
  LDLR targeting guide sequence portion
cuggggacaauugccaaucccu

SEQ ID NO: 8841 - RNA, 22 nt, Artificial Sequence
  LDLR targeting guide sequence portion
cuggguacgguggcacgugccu

SEQ ID NO: 8842 - RNA, 22 nt, Artificial Sequence
  LDLR targeting guide sequence portion
cugggugcaggccacguguccu

SEQ ID NO: 8843 - RNA, 22 nt, Artificial Sequence
  LDLR targeting guide sequence portion
cugggugggucaugauucgggg

SEQ ID NO: 8844 - RNA, 22 nt, Artificial Sequence
  LDLR targeting guide sequence portion
cuggucacccuuaauauuuauu

SEQ ID NO: 8845 - RNA, 22 nt, Artificial Sequence
  LDLR targeting guide sequence portion
cugguccccccgggccuguuuc

SEQ ID NO: 8846 - RNA, 22 nt, Artificial Sequence
  LDLR targeting guide sequence portion
cuggugcccauccucccgaccc

SEQ ID NO: 8847 - RNA, 22 nt, Artificial Sequence
  LDLR targeting guide sequence portion
cugguguccugacagccacacc

SEQ ID NO: 8848 - RNA, 22 nt, Artificial Sequence
  LDLR targeting guide sequence portion
cugguugcuguauuuguucagu

SEQ ID NO: 8849 - RNA, 22 nt, Artificial Sequence
  LDLR targeting guide sequence portion
cugguuucggagcacguaaaug

SEQ ID NO: 8850 - RNA, 22 nt, Artificial Sequence
  LDLR targeting guide sequence portion
cuguacagauaguggggauuuu

SEQ ID NO: 8851 - RNA, 22 nt, Artificial Sequence
  LDLR targeting guide sequence portion
cuguacagggacgcauuuacgu

SEQ ID NO: 8852 - RNA, 22 nt, Artificial Sequence
  LDLR targeting guide sequence portion
cuguauagaagguuuuuguagc

SEQ ID NO: 8853 - RNA, 22 nt, Artificial Sequence
  LDLR targeting guide sequence portion
cuguauuuguucagugacuauu

SEQ ID NO: 8854 - RNA, 22 nt, Artificial Sequence
  LDLR targeting guide sequence portion
cugucacccccgaaucaugacc

SEQ ID NO: 8855 - RNA, 22 nt, Artificial Sequence
  LDLR targeting guide sequence portion
cugucacugucucuccggacau

SEQ ID NO: 8856 - RNA, 22 nt, Artificial Sequence
  LDLR targeting guide sequence portion
cugucaggacaccagccuggug

SEQ ID NO: 8857 - RNA, 22 nt, Artificial Sequence
  LDLR targeting guide sequence portion
cuguccccggcauucauugaca

SEQ ID NO: 8858 - RNA, 22 nt, Artificial Sequence
  LDLR targeting guide sequence portion
cuguccgaagccuguucugccu

SEQ ID NO: 8859 - RNA, 22 nt, Artificial Sequence
  LDLR targeting guide sequence portion
cugucgugagcuaugauuaugc

SEQ ID NO: 8860 - RNA, 22 nt, Artificial Sequence
  LDLR targeting guide sequence portion
cugucguguguguugggauggg

SEQ ID NO: 8861 - RNA, 22 nt, Artificial Sequence
  LDLR targeting guide sequence portion
cugucuagcaaggcuugcauag

SEQ ID NO: 8862 - RNA, 22 nt, Artificial Sequence
  LDLR targeting guide sequence portion
cugucucuccggacaucagugc

SEQ ID NO: 8863 - RNA, 22 nt, Artificial Sequence
  LDLR targeting guide sequence portion
cugucuuugaauaaaacaaggc

SEQ ID NO: 8864 - RNA, 22 nt, Artificial Sequence
  LDLR targeting guide sequence portion
cuguguacauuuggcauuugug

SEQ ID NO: 8865 - RNA, 22 nt, Artificial Sequence
  LDLR targeting guide sequence portion
cuguguaggggguuauugccuc

SEQ ID NO: 8866 - RNA, 22 nt, Artificial Sequence
  LDLR targeting guide sequence portion
cugugucuggccaaauucauuu

SEQ ID NO: 8867 - RNA, 22 nt, Artificial Sequence
  LDLR targeting guide sequence portion
cugugugcaacgcuuuuuggga

SEQ ID NO: 8868 - RNA, 22 nt, Artificial Sequence
  LDLR targeting guide sequence portion
cuguucugccucccagaugaau

SEQ ID NO: 8869 - RNA, 22 nt, Artificial Sequence
  LDLR targeting guide sequence portion
cuguugcacugauguccggaga

SEQ ID NO: 8870 - RNA, 22 nt, Artificial Sequence
  LDLR targeting guide sequence portion
cuguuguguguugaaagccacu

SEQ ID NO: 8871 - RNA, 22 nt, Artificial Sequence
  LDLR targeting guide sequence portion
cuguuucucuuauccuucacga

SEQ ID NO: 8872 - RNA, 22 nt, Artificial Sequence
  LDLR targeting guide sequence portion
cuguuuucugucguguguguug

SEQ ID NO: 8873 - RNA, 22 nt, Artificial Sequence
  LDLR targeting guide sequence portion
cuuaaaaaaugaauuuggccag

SEQ ID NO: 8874 - RNA, 22 nt, Artificial Sequence
  LDLR targeting guide sequence portion
cuuaagccaggaaagggauuca

SEQ ID NO: 8875 - RNA, 22 nt, Artificial Sequence
  LDLR targeting guide sequence portion
cuuaaggaagguacaaacccac

SEQ ID NO: 8876 - RNA, 22 nt, Artificial Sequence
  LDLR targeting guide sequence portion
cuuaauaaauauuaagggugac

SEQ ID NO: 8877 - RNA, 22 nt, Artificial Sequence
  LDLR targeting guide sequence portion
cuuaauauuuauuaagugccug

SEQ ID NO: 8878 - RNA, 22 nt, Artificial Sequence
  LDLR targeting guide sequence portion
cuuacuauguugcccaggcugg

SEQ ID NO: 8879 - RNA, 22 nt, Artificial Sequence
  LDLR targeting guide sequence portion
cuuauccuucacgaggaaagga

SEQ ID NO: 8880 - RNA, 22 nt, Artificial Sequence
  LDLR targeting guide sequence portion
cuucaaagccgugaucgugaau

SEQ ID NO: 8881 - RNA, 22 nt, Artificial Sequence
  LDLR targeting guide sequence portion
cuucacgaggaaaggaagaaac

SEQ ID NO: 8882 - RNA, 22 nt, Artificial Sequence
  LDLR targeting guide sequence portion
cuucacgcgggagucugacgga

SEQ ID NO: 8883 - RNA, 22 nt, Artificial Sequence
  LDLR targeting guide sequence portion
cuucagguucuuucugaaaucg

SEQ ID NO: 8884 - RNA, 22 nt, Artificial Sequence
  LDLR targeting guide sequence portion
cuuccacuucuaugcaaaugcc

SEQ ID NO: 8885 - RNA, 22 nt, Artificial Sequence
  LDLR targeting guide sequence portion
cuuccauguuugaggauugugu

SEQ ID NO: 8886 - RNA, 22 nt, Artificial Sequence
  LDLR targeting guide sequence portion
cuuccauucccguggucuccuu

SEQ ID NO: 8887 - RNA, 22 nt, Artificial Sequence
  LDLR targeting guide sequence portion
cuucccagaggcagagccugag

SEQ ID NO: 8888 - RNA, 22 nt, Artificial Sequence
  LDLR targeting guide sequence portion
cuuccccaaucuugucguugau

SEQ ID NO: 8889 - RNA, 22 nt, Artificial Sequence
  LDLR targeting guide sequence portion
cuuccugagaccucgccggccu

SEQ ID NO: 8890 - RNA, 22 nt, Artificial Sequence
  LDLR targeting guide sequence portion
cuuccuggagagaaauggaggu

SEQ ID NO: 8891 - RNA, 22 nt, Artificial Sequence
  LDLR targeting guide sequence portion
cuuccuuaagccaggaaaggga

SEQ ID NO: 8892 - RNA, 22 nt, Artificial Sequence
  LDLR targeting guide sequence portion
cuuccuuuccucgugaaggaua

SEQ ID NO: 8893 - RNA, 22 nt, Artificial Sequence
  LDLR targeting guide sequence portion
cuucggacagugcccaugcaau

SEQ ID NO: 8894 - RNA, 22 nt, Artificial Sequence
  LDLR targeting guide sequence portion
cuucuauacagugguuuaaaaa

SEQ ID NO: 8895 - RNA, 22 nt, Artificial Sequence
  LDLR targeting guide sequence portion
cuucuaugcaaaugccuccaag

SEQ ID NO: 8896 - RNA, 22 nt, Artificial Sequence
  LDLR targeting guide sequence portion
cuucuaugcaagccuugcuaga

SEQ ID NO: 8897 - RNA, 22 nt, Artificial Sequence
  LDLR targeting guide sequence portion
cuucucugggccugacaucccc

SEQ ID NO: 8898 - RNA, 22 nt, Artificial Sequence
  LDLR targeting guide sequence portion
cuucucugucuuugaauaaaac

SEQ ID NO: 8899 - RNA, 22 nt, Artificial Sequence
  LDLR targeting guide sequence portion
cuucugggagaugggugucacu

SEQ ID NO: 8900 - RNA, 22 nt, Artificial Sequence
  LDLR targeting guide sequence portion
cuugaguucaggaguuggagac

SEQ ID NO: 8901 - RNA, 22 nt, Artificial Sequence
  LDLR targeting guide sequence portion
cuugcacuuucucaguucagag

SEQ ID NO: 8902 - RNA, 22 nt, Artificial Sequence
  LDLR targeting guide sequence portion
cuugcauagaagagguaaacac

SEQ ID NO: 8903 - RNA, 22 nt, Artificial Sequence
  LDLR targeting guide sequence portion
cuugcuagacagccagguuagc

SEQ ID NO: 8904 - RNA, 22 nt, Artificial Sequence
  LDLR targeting guide sequence portion
cuugcuucucugggccugacau

SEQ ID NO: 8905 - RNA, 22 nt, Artificial Sequence
  LDLR targeting guide sequence portion
cuuggaggcauuugcauagaag

SEQ ID NO: 8906 - RNA, 22 nt, Artificial Sequence
  LDLR targeting guide sequence portion
cuuggccgugaggacacguggc

SEQ ID NO: 8907 - RNA, 22 nt, Artificial Sequence
  LDLR targeting guide sequence portion
cuuggguugggauuuugguuuc

SEQ ID NO: 8908 - RNA, 22 nt, Artificial Sequence
  LDLR targeting guide sequence portion
cuugucguugauggguaugugu

SEQ ID NO: 8909 - RNA, 22 nt, Artificial Sequence
  LDLR targeting guide sequence portion
cuugugacaucuucacgcggga

SEQ ID NO: 8910 - RNA, 22 nt, Artificial Sequence
  LDLR targeting guide sequence portion
cuuguuuuauucaaagacagag

SEQ ID NO: 8911 - RNA, 22 nt, Artificial Sequence
  LDLR targeting guide sequence portion
cuuuauguccgcccaccuagug

SEQ ID NO: 8912 - RNA, 22 nt, Artificial Sequence
  LDLR targeting guide sequence portion
cuuucaacacacaacagcagau

SEQ ID NO: 8913 - RNA, 22 nt, Artificial Sequence
  LDLR targeting guide sequence portion
cuuucaucuuccauguuugagg

SEQ ID NO: 8914 - RNA, 22 nt, Artificial Sequence
  LDLR targeting guide sequence portion
cuuucccuggccugggauccca

SEQ ID NO: 8915 - RNA, 22 nt, Artificial Sequence
  LDLR targeting guide sequence portion
cuuuccucgugaaggauaagag

SEQ ID NO: 8916 - RNA, 22 nt, Artificial Sequence
  LDLR targeting guide sequence portion
cuuuccuggcuuaaggaaggua

SEQ ID NO: 8917 - RNA, 22 nt, Artificial Sequence
  LDLR targeting guide sequence portion
cuuucgagguggguuuguaccu

SEQ ID NO: 8918 - RNA, 22 nt, Artificial Sequence
  LDLR targeting guide sequence portion
cuuucucaguucagaguuguac

SEQ ID NO: 8919 - RNA, 22 nt, Artificial Sequence
  LDLR targeting guide sequence portion
cuuucugaaaucgccguguuac

SEQ ID NO: 8920 - RNA, 22 nt, Artificial Sequence
  LDLR targeting guide sequence portion
cuuucugguuucggagcacgua

SEQ ID NO: 8921 - RNA, 22 nt, Artificial Sequence
  LDLR targeting guide sequence portion
cuuugaagucccggucaaccug

SEQ ID NO: 8922 - RNA, 22 nt, Artificial Sequence
  LDLR targeting guide sequence portion
cuuugaauaaaacaaggccggc

SEQ ID NO: 8923 - RNA, 22 nt, Artificial Sequence
  LDLR targeting guide sequence portion
cuuugcccugucacccccgaau

SEQ ID NO: 8924 - RNA, 22 nt, Artificial Sequence
  LDLR targeting guide sequence portion
cuuugggaggcugagcuggauc

SEQ ID NO: 8925 - RNA, 22 nt, Artificial Sequence
  LDLR targeting guide sequence portion
cuuuggucuucucugucuuuga

SEQ ID NO: 8926 - RNA, 22 nt, Artificial Sequence
  LDLR targeting guide sequence portion
cuuuguacauaaagaagaggca

SEQ ID NO: 8927 - RNA, 22 nt, Artificial Sequence
  LDLR targeting guide sequence portion
cuuuguugcucaggccuggucu

SEQ ID NO: 8928 - RNA, 22 nt, Artificial Sequence
  LDLR targeting guide sequence portion
cuuuuugggagaaugauguccc

SEQ ID NO: 8929 - RNA, 22 nt, Artificial Sequence
  LDLR targeting guide sequence portion
cuuuuugguuuuuguagagaug

SEQ ID NO: 8930 - RNA, 22 nt, Artificial Sequence
  LDLR targeting guide sequence portion
gaaacaggcccggggggaccag

SEQ ID NO: 8931 - RNA, 22 nt, Artificial Sequence
  LDLR targeting guide sequence portion
gaaaccaaaaucccaacccaag

SEQ ID NO: 8932 - RNA, 22 nt, Artificial Sequence
  LDLR targeting guide sequence portion
gaaaccagaaaggcuuaucacg

SEQ ID NO: 8933 - RNA, 22 nt, Artificial Sequence
  LDLR targeting guide sequence portion
gaaacucaaaacuuccuggaga

SEQ ID NO: 8934 - RNA, 22 nt, Artificial Sequence
  LDLR targeting guide sequence portion
gaaagaaccugaagucccguca

SEQ ID NO: 8935 - RNA, 22 nt, Artificial Sequence
  LDLR targeting guide sequence portion
gaaagacacugggugggucaug

SEQ ID NO: 8936 - RNA, 22 nt, Artificial Sequence
  LDLR targeting guide sequence portion
gaaagcaguggcauaaucauag

SEQ ID NO: 8937 - RNA, 22 nt, Artificial Sequence
  LDLR targeting guide sequence portion
gaaagccacuugcuucucuggg

SEQ ID NO: 8938 - RNA, 22 nt, Artificial Sequence
  LDLR targeting guide sequence portion
gaaagcccgugucaaugaaugc

SEQ ID NO: 8939 - RNA, 22 nt, Artificial Sequence
  LDLR targeting guide sequence portion
gaaaggaagaaaccaaaauccc

SEQ ID NO: 8940 - RNA, 22 nt, Artificial Sequence
  LDLR targeting guide sequence portion
gaaaggcuuaucacgguucccu

SEQ ID NO: 8941 - RNA, 22 nt, Artificial Sequence
  LDLR targeting guide sequence portion
gaaagggauucauggcgucgga

SEQ ID NO: 8942 - RNA, 22 nt, Artificial Sequence
  LDLR targeting guide sequence portion
gaaaggggaggggaugucaggc

SEQ ID NO: 8943 - RNA, 22 nt, Artificial Sequence
  LDLR targeting guide sequence portion
gaaagugcaaggagaccacggg

SEQ ID NO: 8944 - RNA, 22 nt, Artificial Sequence
  LDLR targeting guide sequence portion
gaaaucgccguguuacuguugc

SEQ ID NO: 8945 - RNA, 22 nt, Artificial Sequence
  LDLR targeting guide sequence portion
gaaaugaucuggcugaauccgu

SEQ ID NO: 8946 - RNA, 22 nt, Artificial Sequence
  LDLR targeting guide sequence portion
gaaaugccucuucuuuauguac

SEQ ID NO: 8947 - RNA, 22 nt, Artificial Sequence
  LDLR targeting guide sequence portion
gaaauggaggugucauccuggu

SEQ ID NO: 8948 - RNA, 22 nt, Artificial Sequence
  LDLR targeting guide sequence portion
gaacaaauacagcaaccagggu

SEQ ID NO: 8949 - RNA, 22 nt, Artificial Sequence
  LDLR targeting guide sequence portion
gaacaggcuucggacagugccc

SEQ ID NO: 8950 - RNA, 22 nt, Artificial Sequence
  LDLR targeting guide sequence portion
gaacaucugccuggagucccgu

SEQ ID NO: 8951 - RNA, 22 nt, Artificial Sequence
  LDLR targeting guide sequence portion
gaacccuuccugagaccucgcc

SEQ ID NO: 8952 - RNA, 22 nt, Artificial Sequence
  LDLR targeting guide sequence portion
gaaccgugauaagccuuucugg

SEQ ID NO: 8953 - RNA, 22 nt, Artificial Sequence
  LDLR targeting guide sequence portion
gaaccugaagucccgucaaacg

SEQ ID NO: 8954 - RNA, 22 nt, Artificial Sequence
  LDLR targeting guide sequence portion
gaacucaagugauccagcucag

SEQ ID NO: 8955 - RNA, 22 nt, Artificial Sequence
  LDLR targeting guide sequence portion
gaacugagaaagugcaaggaga

SEQ ID NO: 8956 - RNA, 22 nt, Artificial Sequence
  LDLR targeting guide sequence portion
gaacugccauugucgucuuuau

SEQ ID NO: 8957 - RNA, 22 nt, Artificial Sequence
  LDLR targeting guide sequence portion
gaacuggacugugugcaacgcu

SEQ ID NO: 8958 - RNA, 22 nt, Artificial Sequence
  LDLR targeting guide sequence portion
gaagaaaccaaaaucccaaccc

SEQ ID NO: 8959 - RNA, 22 nt, Artificial Sequence
  LDLR targeting guide sequence portion
gaagaccaaagcauugccugcc

SEQ ID NO: 8960 - RNA, 22 nt, Artificial Sequence
  LDLR targeting guide sequence portion
gaagacccuauuucagaaauac

SEQ ID NO: 8961 - RNA, 22 nt, Artificial Sequence
  LDLR targeting guide sequence portion
gaagaggcauuucagaggcaau

SEQ ID NO: 8962 - RNA, 22 nt, Artificial Sequence
  LDLR targeting guide sequence portion
gaagagguaaacacguugacuc

SEQ ID NO: 8963 - RNA, 22 nt, Artificial Sequence
  LDLR targeting guide sequence portion
gaagaugaaaggggaggggaug

SEQ ID NO: 8964 - RNA, 22 nt, Artificial Sequence
  LDLR targeting guide sequence portion
gaagaugucacaagggauuggc

SEQ ID NO: 8965 - RNA, 22 nt, Artificial Sequence
  LDLR targeting guide sequence portion
gaagcaaguggcuuucaacaca

SEQ ID NO: 8966 - RNA, 22 nt, Artificial Sequence
  LDLR targeting guide sequence portion
gaagcacuaggugggcggacau

SEQ ID NO: 8967 - RNA, 22 nt, Artificial Sequence
  LDLR targeting guide sequence portion
gaagccacucauacauacaacg

SEQ ID NO: 8968 - RNA, 22 nt, Artificial Sequence
  LDLR targeting guide sequence portion
gaagccuguucugccucccaga

SEQ ID NO: 8969 - RNA, 22 nt, Artificial Sequence
  LDLR targeting guide sequence portion
gaaggauaagagaaacaggccc

SEQ ID NO: 8970 - RNA, 22 nt, Artificial Sequence
  LDLR targeting guide sequence portion
gaaggguucugggcagggacgg

SEQ ID NO: 8971 - RNA, 22 nt, Artificial Sequence
  LDLR targeting guide sequence portion
gaagguacaaacccaccucgaa

SEQ ID NO: 8972 - RNA, 22 nt, Artificial Sequence
  LDLR targeting guide sequence portion
gaagguuuuuguagccugaaug

SEQ ID NO: 8973 - RNA, 22 nt, Artificial Sequence
  LDLR targeting guide sequence portion
gaagucccggucaaccugcccc

SEQ ID NO: 8974 - RNA, 22 nt, Artificial Sequence
  LDLR targeting guide sequence portion
gaagucccgucaaacgauccag

SEQ ID NO: 8975 - RNA, 22 nt, Artificial Sequence
  LDLR targeting guide sequence portion
gaagugaauggcuuggaggcau

SEQ ID NO: 8976 - RNA, 22 nt, Artificial Sequence
  LDLR targeting guide sequence portion
gaaguggaagcacuaggugggc

SEQ ID NO: 8977 - RNA, 22 nt, Artificial Sequence
  LDLR targeting guide sequence portion
gaaguggcaucauuuggugaau

SEQ ID NO: 8978 - RNA, 22 nt, Artificial Sequence
  LDLR targeting guide sequence portion
gaaguggguaggggucgggagg

SEQ ID NO: 8979 - RNA, 22 nt, Artificial Sequence
  LDLR targeting guide sequence portion
gaaguuuugaguuucucuccac

SEQ ID NO: 8980 - RNA, 22 nt, Artificial Sequence
  LDLR targeting guide sequence portion
gaauaaaacaaggccggcgagg

SEQ ID NO: 8981 - RNA, 22 nt, Artificial Sequence
  LDLR targeting guide sequence portion
gaauagucacugaacaaauaca

SEQ ID NO: 8982 - RNA, 22 nt, Artificial Sequence
  LDLR targeting guide sequence portion
gaauaucgagaacugccauugu

SEQ ID NO: 8983 - RNA, 22 nt, Artificial Sequence
  LDLR targeting guide sequence portion
gaaucaugacccacccaguguc

SEQ ID NO: 8984 - RNA, 22 nt, Artificial Sequence
  LDLR targeting guide sequence portion
gaaucccuuuccuggcuuaagg

SEQ ID NO: 8985 - RNA, 22 nt, Artificial Sequence
  LDLR targeting guide sequence portion
gaauccgugguggcaccgagac

SEQ ID NO: 8986 - RNA, 22 nt, Artificial Sequence
  LDLR targeting guide sequence portion
gaaugaguuuggucucggugcc

SEQ ID NO: 8987 - RNA, 22 nt, Artificial Sequence
  LDLR targeting guide sequence portion
gaaugauguccccguuguaugu

SEQ ID NO: 8988 - RNA, 22 nt, Artificial Sequence
  LDLR targeting guide sequence portion
gaaugccggggacagagagggg

SEQ ID NO: 8989 - RNA, 22 nt, Artificial Sequence
  LDLR targeting guide sequence portion
gaauggaaguggguaggggucg

SEQ ID NO: 8990 - RNA, 22 nt, Artificial Sequence
  LDLR targeting guide sequence portion
gaauggcuuggaggcauuugca

SEQ ID NO: 8991 - RNA, 22 nt, Artificial Sequence
  LDLR targeting guide sequence portion
gaauuuggccagacacaggugc

SEQ ID NO: 8992 - RNA, 22 nt, Artificial Sequence
  LDLR targeting guide sequence portion
gacaagauuggggaagugaaug

SEQ ID NO: 8993 - RNA, 22 nt, Artificial Sequence
  LDLR targeting guide sequence portion
gacaauggcaguucucgauauu

SEQ ID NO: 8994 - RNA, 22 nt, Artificial Sequence
  LDLR targeting guide sequence portion
gacaauugccaaucccuuguga

SEQ ID NO: 8995 - RNA, 22 nt, Artificial Sequence
  LDLR targeting guide sequence portion
gacacaauccucaaacauggaa

SEQ ID NO: 8996 - RNA, 22 nt, Artificial Sequence
  LDLR targeting guide sequence portion
gacacaggugccucacgccugu

SEQ ID NO: 8997 - RNA, 22 nt, Artificial Sequence
  LDLR targeting guide sequence portion
gacacaguguuuugucccuggg

SEQ ID NO: 8998 - RNA, 22 nt, Artificial Sequence
  LDLR targeting guide sequence portion
gacaccagccuggugcccaucc

SEQ ID NO: 8999 - RNA, 22 nt, Artificial Sequence
  LDLR targeting guide sequence portion
gacacccaucucccagaagcca

SEQ ID NO: 9000 - RNA, 22 nt, Artificial Sequence
  LDLR targeting guide sequence portion
gacacccgguuaccuuggccgu

SEQ ID NO: 9001 - RNA, 22 nt, Artificial Sequence
  LDLR targeting guide sequence portion
gacaccuccauuucucuccagg

SEQ ID NO: 9002 - RNA, 22 nt, Artificial Sequence
  LDLR targeting guide sequence portion
gacacgggcuuucccuggccug

SEQ ID NO: 9003 - RNA, 22 nt, Artificial Sequence
  LDLR targeting guide sequence portion
gacacguggccugcacccaggu

SEQ ID NO: 9004 - RNA, 22 nt, Artificial Sequence
  LDLR targeting guide sequence portion
gacacugggugggucaugauuc

SEQ ID NO: 9005 - RNA, 22 nt, Artificial Sequence
  LDLR targeting guide sequence portion
gacagaaaacagugcaaaauaa

SEQ ID NO: 9006 - RNA, 22 nt, Artificial Sequence
  LDLR targeting guide sequence portion
gacagagaagaccaaagcauug

SEQ ID NO: 9007 - RNA, 22 nt, Artificial Sequence
  LDLR targeting guide sequence portion
gacagagaggggcagguugacc

SEQ ID NO: 9008 - RNA, 22 nt, Artificial Sequence
  LDLR targeting guide sequence portion
gacagauggucagucuggagga

SEQ ID NO: 9009 - RNA, 22 nt, Artificial Sequence
  LDLR targeting guide sequence portion
gacagccacaccugggugcagg

SEQ ID NO: 9010 - RNA, 22 nt, Artificial Sequence
  LDLR targeting guide sequence portion
gacagccagguuagccuuugcc

SEQ ID NO: 9011 - RNA, 22 nt, Artificial Sequence
  LDLR targeting guide sequence portion
gacagccucaaaugccugagcu

SEQ ID NO: 9012 - RNA, 22 nt, Artificial Sequence
  LDLR targeting guide sequence portion
gacagccuccgucagacucccg

SEQ ID NO: 9013 - RNA, 22 nt, Artificial Sequence
  LDLR targeting guide sequence portion
gacagggcaaaggcuaaccugg

SEQ ID NO: 9014 - RNA, 22 nt, Artificial Sequence
  LDLR targeting guide sequence portion
gacagugacagccuccgucaga

SEQ ID NO: 9015 - RNA, 22 nt, Artificial Sequence
  LDLR targeting guide sequence portion
gacagugcccaugcaauggcuu

SEQ ID NO: 9016 - RNA, 22 nt, Artificial Sequence
  LDLR targeting guide sequence portion
gacauaaagacgacaauggcag

SEQ ID NO: 9017 - RNA, 22 nt, Artificial Sequence
  LDLR targeting guide sequence portion
gacaucagugcaacaguaacac

SEQ ID NO: 9018 - RNA, 22 nt, Artificial Sequence
  LDLR targeting guide sequence portion
gacaucauucucccaaaaagcg

SEQ ID NO: 9019 - RNA, 22 nt, Artificial Sequence
  LDLR targeting guide sequence portion
gacauccccuccccuuucaucu

SEQ ID NO: 9020 - RNA, 22 nt, Artificial Sequence
  LDLR targeting guide sequence portion
gacaucuucacgcgggagucug

SEQ ID NO: 9021 - RNA, 22 nt, Artificial Sequence
  LDLR targeting guide sequence portion
gacauucaggcuacaaaaaccu

SEQ ID NO: 9022 - RNA, 22 nt, Artificial Sequence
  LDLR targeting guide sequence portion
gaccaaacucauucaccaaaug

SEQ ID NO: 9023 - RNA, 22 nt, Artificial Sequence
  LDLR targeting guide sequence portion
gaccaaagcauugccugccaga

SEQ ID NO: 9024 - RNA, 22 nt, Artificial Sequence
  LDLR targeting guide sequence portion
gaccacgggaauggaagugggu

SEQ ID NO: 9025 - RNA, 22 nt, Artificial Sequence
  LDLR targeting guide sequence portion
gaccaggaugacaccuccauuu

SEQ ID NO: 9026 - RNA, 22 nt, Artificial Sequence
  LDLR targeting guide sequence portion
gaccaggccugagcaacaaagc

SEQ ID NO: 9027 - RNA, 22 nt, Artificial Sequence
  LDLR targeting guide sequence portion
gaccagugacucaggcucugcc

SEQ ID NO: 9028 - RNA, 22 nt, Artificial Sequence
  LDLR targeting guide sequence portion
gacccacccagugucuuucgag

SEQ ID NO: 9029 - RNA, 22 nt, Artificial Sequence
  LDLR targeting guide sequence portion
gaccccaucucuuaaaaaauga

SEQ ID NO: 9030 - RNA, 22 nt, Artificial Sequence
  LDLR targeting guide sequence portion
gacccccuggcccugccucauc

SEQ ID NO: 9031 - RNA, 22 nt, Artificial Sequence
  LDLR targeting guide sequence portion
gaccccuacccacuuccauucc

SEQ ID NO: 9032 - RNA, 22 nt, Artificial Sequence
  LDLR targeting guide sequence portion
gaccgggacuucaaagccguga

SEQ ID NO: 9033 - RNA, 22 nt, Artificial Sequence
  LDLR targeting guide sequence portion
gaccucgccggccuuguuuuau

SEQ ID NO: 9034 - RNA, 22 nt, Artificial Sequence
  LDLR targeting guide sequence portion
gacgacaauggcaguucucgau

SEQ ID NO: 9035 - RNA, 22 nt, Artificial Sequence
  LDLR targeting guide sequence portion
gacgcauuuacgugcuccgaaa

SEQ ID NO: 9036 - RNA, 22 nt, Artificial Sequence
  LDLR targeting guide sequence portion
gacgccaugaaucccuuuccug

SEQ ID NO: 9037 - RNA, 22 nt, Artificial Sequence
  LDLR targeting guide sequence portion
gacggaggcugucacugucucu

SEQ ID NO: 9038 - RNA, 22 nt, Artificial Sequence
  LDLR targeting guide sequence portion
gacgggacuccaggcagauguu

SEQ ID NO: 9039 - RNA, 22 nt, Artificial Sequence
  LDLR targeting guide sequence portion
gacgggacuucagguucuuucu

SEQ ID NO: 9040 - RNA, 22 nt, Artificial Sequence
  LDLR targeting guide sequence portion
gacguggcgugaacaucugccu

SEQ ID NO: 9041 - RNA, 22 nt, Artificial Sequence
  LDLR targeting guide sequence portion
gacuauucucggggcccugugu

SEQ ID NO: 9042 - RNA, 22 nt, Artificial Sequence
  LDLR targeting guide sequence portion
gacucaggcucugccucuggga

SEQ ID NO: 9043 - RNA, 22 nt, Artificial Sequence
  LDLR targeting guide sequence portion
gacuccaggcagauguucacgc

SEQ ID NO: 9044 - RNA, 22 nt, Artificial Sequence
  LDLR targeting guide sequence portion
gacucccgcgugaagaugucac

SEQ ID NO: 9045 - RNA, 22 nt, Artificial Sequence
  LDLR targeting guide sequence portion
gacuccugaguuuagggguuug

SEQ ID NO: 9046 - RNA, 22 nt, Artificial Sequence
  LDLR targeting guide sequence portion
gacugugugcaacgcuuuuugg

SEQ ID NO: 9047 - RNA, 22 nt, Artificial Sequence
  LDLR targeting guide sequence portion
gacuucaaagccgugaucguga

SEQ ID NO: 9048 - RNA, 22 nt, Artificial Sequence
  LDLR targeting guide sequence portion
gacuucagguucuuucugaaau

SEQ ID NO: 9049 - RNA, 22 nt, Artificial Sequence
  LDLR targeting guide sequence portion
gagaaacaggcccggggggacc

SEQ ID NO: 9050 - RNA, 22 nt, Artificial Sequence
  LDLR targeting guide sequence portion
gagaaacucaaaacuuccugga

SEQ ID NO: 9051 - RNA, 22 nt, Artificial Sequence
  LDLR targeting guide sequence portion
gagaaagugcaaggagaccacg

SEQ ID NO: 9052 - RNA, 22 nt, Artificial Sequence
  LDLR targeting guide sequence portion
gagaaauggaggugucauccug

SEQ ID NO: 9053 - RNA, 22 nt, Artificial Sequence
  LDLR targeting guide sequence portion
gagaacugccauugucgucuuu

SEQ ID NO: 9054 - RNA, 22 nt, Artificial Sequence
  LDLR targeting guide sequence portion
gagaagaccaaagcauugccug

SEQ ID NO: 9055 - RNA, 22 nt, Artificial Sequence
  LDLR targeting guide sequence portion
gagaagcaaguggcuuucaaca

SEQ ID NO: 9056 - RNA, 22 nt, Artificial Sequence
  LDLR targeting guide sequence portion
gagaauagucacugaacaaaua

SEQ ID NO: 9057 - RNA, 22 nt, Artificial Sequence
  LDLR targeting guide sequence portion
gagaaugauguccccguuguau

SEQ ID NO: 9058 - RNA, 22 nt, Artificial Sequence
  LDLR targeting guide sequence portion
gagacacccgguuaccuuggcc

SEQ ID NO: 9059 - RNA, 22 nt, Artificial Sequence
  LDLR targeting guide sequence portion
gagacagauggucagucuggag

SEQ ID NO: 9060 - RNA, 22 nt, Artificial Sequence
  LDLR targeting guide sequence portion
gagacagugacagccuccguca

SEQ ID NO: 9061 - RNA, 22 nt, Artificial Sequence
  LDLR targeting guide sequence portion
gagaccaaacucauucaccaaa

SEQ ID NO: 9062 - RNA, 22 nt, Artificial Sequence
  LDLR targeting guide sequence portion
gagaccacgggaauggaagugg

SEQ ID NO: 9063 - RNA, 22 nt, Artificial Sequence
  LDLR targeting guide sequence portion
gagaccaggccugagcaacaaa

SEQ ID NO: 9064 - RNA, 22 nt, Artificial Sequence
  LDLR targeting guide sequence portion
gagaccucgccggccuuguuuu

SEQ ID NO: 9065 - RNA, 22 nt, Artificial Sequence
  LDLR targeting guide sequence portion
gagagaaacucaaaacuuccug

SEQ ID NO: 9066 - RNA, 22 nt, Artificial Sequence
  LDLR targeting guide sequence portion
gagagaaauggaggugucaucc

SEQ ID NO: 9067 - RNA, 22 nt, Artificial Sequence
  LDLR targeting guide sequence portion
gagagacagugacagccuccgu

SEQ ID NO: 9068 - RNA, 22 nt, Artificial Sequence
  LDLR targeting guide sequence portion
gagaggggcagguugaccggga

SEQ ID NO: 9069 - RNA, 22 nt, Artificial Sequence
  LDLR targeting guide sequence portion
gagaucccaucucuacaaaaac

SEQ ID NO: 9070 - RNA, 22 nt, Artificial Sequence
  LDLR targeting guide sequence portion
gagaugggaucucgcuuuguug

SEQ ID NO: 9071 - RNA, 22 nt, Artificial Sequence
  LDLR targeting guide sequence portion
gagaugggugucacuuuuuaaa

SEQ ID NO: 9072 - RNA, 22 nt, Artificial Sequence
  LDLR targeting guide sequence portion
gagauugguggaugaggcaggg

SEQ ID NO: 9073 - RNA, 22 nt, Artificial Sequence
  LDLR targeting guide sequence portion
gagcaacaaagcgagaucccau

SEQ ID NO: 9074 - RNA, 22 nt, Artificial Sequence
  LDLR targeting guide sequence portion
gagcacguaaaugcgucccugu

SEQ ID NO: 9075 - RNA, 22 nt, Artificial Sequence
  LDLR targeting guide sequence portion
gagccacugcgcccggccucac

SEQ ID NO: 9076 - RNA, 22 nt, Artificial Sequence
  LDLR targeting guide sequence portion
gagccugagucacuggucaccc

SEQ ID NO: 9077 - RNA, 22 nt, Artificial Sequence
  LDLR targeting guide sequence portion
gagcuaugauuaugccacugcu

SEQ ID NO: 9078 - RNA, 22 nt, Artificial Sequence
  LDLR targeting guide sequence portion
gagcucaggcauuugaggcugu

SEQ ID NO: 9079 - RNA, 22 nt, Artificial Sequence
  LDLR targeting guide sequence portion
gagcuggaucacuugaguucag

SEQ ID NO: 9080 - RNA, 22 nt, Artificial Sequence
  LDLR targeting guide sequence portion
gaggaaaggaagaaaccaaaau

SEQ ID NO: 9081 - RNA, 22 nt, Artificial Sequence
  LDLR targeting guide sequence portion
gaggacacguggccugcaccca

SEQ ID NO: 9082 - RNA, 22 nt, Artificial Sequence
  LDLR targeting guide sequence portion
gaggaugacguggcgugaacau

SEQ ID NO: 9083 - RNA, 22 nt, Artificial Sequence
  LDLR targeting guide sequence portion
gaggaugggcaccaggcuggug

SEQ ID NO: 9084 - RNA, 22 nt, Artificial Sequence
  LDLR targeting guide sequence portion
gaggaugguuugagcucaggca

SEQ ID NO: 9085 - RNA, 22 nt, Artificial Sequence
  LDLR targeting guide sequence portion
gaggauugugucacgguggaga

SEQ ID NO: 9086 - RNA, 22 nt, Artificial Sequence
  LDLR targeting guide sequence portion
gaggcaauaacccccuacacag

SEQ ID NO: 9087 - RNA, 22 nt, Artificial Sequence
  LDLR targeting guide sequence portion
gaggcaccugugucuggccaaa

SEQ ID NO: 9088 - RNA, 22 nt, Artificial Sequence
  LDLR targeting guide sequence portion
gaggcagaacaggcuucggaca

SEQ ID NO: 9089 - RNA, 22 nt, Artificial Sequence
  LDLR targeting guide sequence portion
gaggcagagccugagucacugg

SEQ ID NO: 9090 - RNA, 22 nt, Artificial Sequence
  LDLR targeting guide sequence portion
gaggcagggccagggggucccg

SEQ ID NO: 9091 - RNA, 22 nt, Artificial Sequence
  LDLR targeting guide sequence portion
gaggcauuucagaggcaauaac

SEQ ID NO: 9092 - RNA, 22 nt, Artificial Sequence
  LDLR targeting guide sequence portion
gaggcauuugcauagaagugga

SEQ ID NO: 9093 - RNA, 22 nt, Artificial Sequence
  LDLR targeting guide sequence portion
gaggccaugggcugcugaugca

SEQ ID NO: 9094 - RNA, 22 nt, Artificial Sequence
  LDLR targeting guide sequence portion
gaggcugagcuggaucacuuga

SEQ ID NO: 9095 - RNA, 22 nt, Artificial Sequence
  LDLR targeting guide sequence portion
gaggcugucacugucucuccgg

SEQ ID NO: 9096 - RNA, 22 nt, Artificial Sequence
  LDLR targeting guide sequence portion
gaggggaugucaggcccagaga

SEQ ID NO: 9097 - RNA, 22 nt, Artificial Sequence
  LDLR targeting guide sequence portion
gaggggcagguugaccgggacu

SEQ ID NO: 9098 - RNA, 22 nt, Artificial Sequence
  LDLR targeting guide sequence portion
gagguaaacacguugacuccug

SEQ ID NO: 9099 - RNA, 22 nt, Artificial Sequence
  LDLR targeting guide sequence portion
gaggucucaggaaggguucugg

SEQ ID NO: 9100 - RNA, 22 nt, Artificial Sequence
  LDLR targeting guide sequence portion
gaggugggaggaugguuugagc

SEQ ID NO: 9101 - RNA, 22 nt, Artificial Sequence
  LDLR targeting guide sequence portion
gagguggguuuguaccuuccuu

SEQ ID NO: 9102 - RNA, 22 nt, Artificial Sequence
  LDLR targeting guide sequence portion
gaggugucauccuggucccccc

SEQ ID NO: 9103 - RNA, 22 nt, Artificial Sequence
  LDLR targeting guide sequence portion
gagucaacguguuuaccucuuc

SEQ ID NO: 9104 - RNA, 22 nt, Artificial Sequence
  LDLR targeting guide sequence portion
gagucacuggucacccuuaaua

SEQ ID NO: 9105 - RNA, 22 nt, Artificial Sequence
  LDLR targeting guide sequence portion
gagucccgucccugcccagaac

SEQ ID NO: 9106 - RNA, 22 nt, Artificial Sequence
  LDLR targeting guide sequence portion
gagucugacggaggcugucacu

SEQ ID NO: 9107 - RNA, 22 nt, Artificial Sequence
  LDLR targeting guide sequence portion
gaguggcuucugggagaugggu

SEQ ID NO: 9108 - RNA, 22 nt, Artificial Sequence
  LDLR targeting guide sequence portion
gaguucaggaguuggagaccag

SEQ ID NO: 9109 - RNA, 22 nt, Artificial Sequence
  LDLR targeting guide sequence portion
gaguuggagaccaggccugagc

SEQ ID NO: 9110 - RNA, 22 nt, Artificial Sequence
  LDLR targeting guide sequence portion
gaguuguacacuguguacauuu

SEQ ID NO: 9111 - RNA, 22 nt, Artificial Sequence
  LDLR targeting guide sequence portion
gaguuuagggguuuggcuuaga

SEQ ID NO: 9112 - RNA, 22 nt, Artificial Sequence
  LDLR targeting guide sequence portion
gaguuucucuccaccgugacac

SEQ ID NO: 9113 - RNA, 22 nt, Artificial Sequence
  LDLR targeting guide sequence portion
gaguuuggucucggugccacca

SEQ ID NO: 9114 - RNA, 22 nt, Artificial Sequence
  LDLR targeting guide sequence portion
gauaagagaaacaggcccgggg

SEQ ID NO: 9115 - RNA, 22 nt, Artificial Sequence
  LDLR targeting guide sequence portion
gauaagccuuucugguuucgga

SEQ ID NO: 9116 - RNA, 22 nt, Artificial Sequence
  LDLR targeting guide sequence portion
gauaguggggauuuuuuguuau

SEQ ID NO: 9117 - RNA, 22 nt, Artificial Sequence
  LDLR targeting guide sequence portion
gauauucacgaucacggcuuug

SEQ ID NO: 9118 - RNA, 22 nt, Artificial Sequence
  LDLR targeting guide sequence portion
gaucacaggcacgugccaccgu

SEQ ID NO: 9119 - RNA, 22 nt, Artificial Sequence
  LDLR targeting guide sequence portion
gaucacaguaagacauucaggc

SEQ ID NO: 9120 - RNA, 22 nt, Artificial Sequence
  LDLR targeting guide sequence portion
gaucacggcuuugaagucccgg

SEQ ID NO: 9121 - RNA, 22 nt, Artificial Sequence
  LDLR targeting guide sequence portion
gaucauuuccgacgccaugaau

SEQ ID NO: 9122 - RNA, 22 nt, Artificial Sequence
  LDLR targeting guide sequence portion
gauccagacuggaggauuuauu

SEQ ID NO: 9123 - RNA, 22 nt, Artificial Sequence
  LDLR targeting guide sequence portion
gauccagcucagccucccaaag

SEQ ID NO: 9124 - RNA, 22 nt, Artificial Sequence
  LDLR targeting guide sequence portion
gaucccaggccagggaaagccc

SEQ ID NO: 9125 - RNA, 22 nt, Artificial Sequence
  LDLR targeting guide sequence portion
gaucccaucccaacacacacga

SEQ ID NO: 9126 - RNA, 22 nt, Artificial Sequence
  LDLR targeting guide sequence portion
gaucccaucucuacaaaaacca

SEQ ID NO: 9127 - RNA, 22 nt, Artificial Sequence
  LDLR targeting guide sequence portion
gaucgugaauaucgagaacugc

SEQ ID NO: 9128 - RNA, 22 nt, Artificial Sequence
  LDLR targeting guide sequence portion
gaucguuugacgggacuucagg

SEQ ID NO: 9129 - RNA, 22 nt, Artificial Sequence
  LDLR targeting guide sequence portion
gaucucgcuuuguugcucaggc

SEQ ID NO: 9130 - RNA, 22 nt, Artificial Sequence
  LDLR targeting guide sequence portion
gaucuggcugaauccguggugg

SEQ ID NO: 9131 - RNA, 22 nt, Artificial Sequence
  LDLR targeting guide sequence portion
gaugaaaggggaggggauguca

SEQ ID NO: 9132 - RNA, 22 nt, Artificial Sequence
  LDLR targeting guide sequence portion
gaugaagacccuauuucagaaa

SEQ ID NO: 9133 - RNA, 22 nt, Artificial Sequence
  LDLR targeting guide sequence portion
gaugacaccuccauuucucucc

SEQ ID NO: 9134 - RNA, 22 nt, Artificial Sequence
  LDLR targeting guide sequence portion
gaugacguggcgugaacaucug

SEQ ID NO: 9135 - RNA, 22 nt, Artificial Sequence
  LDLR targeting guide sequence portion
gaugaggcagggccaggggguc

SEQ ID NO: 9136 - RNA, 22 nt, Artificial Sequence
  LDLR targeting guide sequence portion
gaugccacuucccagaggcaga

SEQ ID NO: 9137 - RNA, 22 nt, Artificial Sequence
  LDLR targeting guide sequence portion
gauggcaccaacgggacccccu

SEQ ID NO: 9138 - RNA, 22 nt, Artificial Sequence
  LDLR targeting guide sequence portion
gaugggaucccaggccagggaa

SEQ ID NO: 9139 - RNA, 22 nt, Artificial Sequence
  LDLR targeting guide sequence portion
gaugggaucucgcuuuguugcu

SEQ ID NO: 9140 - RNA, 22 nt, Artificial Sequence
  LDLR targeting guide sequence portion
gauggguauguguuuaaaacau

SEQ ID NO: 9141 - RNA, 22 nt, Artificial Sequence
  LDLR targeting guide sequence portion
gaugggugucacuuuuuaaacc

SEQ ID NO: 9142 - RNA, 22 nt, Artificial Sequence
  LDLR targeting guide sequence portion
gauggucagucuggaggaugac

SEQ ID NO: 9143 - RNA, 22 nt, Artificial Sequence
  LDLR targeting guide sequence portion
gaugguuugagcucaggcauuu

SEQ ID NO: 9144 - RNA, 22 nt, Artificial Sequence
  LDLR targeting guide sequence portion
gaugucacaagggauuggcaau

SEQ ID NO: 9145 - RNA, 22 nt, Artificial Sequence
  LDLR targeting guide sequence portion
gaugucaggcccagagaagcaa

SEQ ID NO: 9146 - RNA, 22 nt, Artificial Sequence
  LDLR targeting guide sequence portion
gauguccccguuguauguauga

SEQ ID NO: 9147 - RNA, 22 nt, Artificial Sequence
  LDLR targeting guide sequence portion
gauguccggagagacagugaca

SEQ ID NO: 9148 - RNA, 22 nt, Artificial Sequence
  LDLR targeting guide sequence portion
gauguucacgccacgucauccu

SEQ ID NO: 9149 - RNA, 22 nt, Artificial Sequence
  LDLR targeting guide sequence portion
gauuacaggcgugaggcaccug

SEQ ID NO: 9150 - RNA, 22 nt, Artificial Sequence
  LDLR targeting guide sequence portion
gauuaugccacugcuuuccagc

SEQ ID NO: 9151 - RNA, 22 nt, Artificial Sequence
  LDLR targeting guide sequence portion
gauuauuugcacgaacuggacu

SEQ ID NO: 9152 - RNA, 22 nt, Artificial Sequence
  LDLR targeting guide sequence portion
gauucagccagaucauuuccga

SEQ ID NO: 9153 - RNA, 22 nt, Artificial Sequence
  LDLR targeting guide sequence portion
gauucauggcgucggaaaugau

SEQ ID NO: 9154 - RNA, 22 nt, Artificial Sequence
  LDLR targeting guide sequence portion
gauucgggggugacagggcaaa

SEQ ID NO: 9155 - RNA, 22 nt, Artificial Sequence
  LDLR targeting guide sequence portion
gauuggcaauuguccccaggga

SEQ ID NO: 9156 - RNA, 22 nt, Artificial Sequence
  LDLR targeting guide sequence portion
gauuggggaagugaauggcuug

SEQ ID NO: 9157 - RNA, 22 nt, Artificial Sequence
  LDLR targeting guide sequence portion
gauugguggaugaggcagggcc

SEQ ID NO: 9158 - RNA, 22 nt, Artificial Sequence
  LDLR targeting guide sequence portion
gauugugucacgguggagagaa

SEQ ID NO: 9159 - RNA, 22 nt, Artificial Sequence
  LDLR targeting guide sequence portion
gauuucagaaagaaccugaagu

SEQ ID NO: 9160 - RNA, 22 nt, Artificial Sequence
  LDLR targeting guide sequence portion
gauuuugguuucuuccuuuccu

SEQ ID NO: 9161 - RNA, 22 nt, Artificial Sequence
  LDLR targeting guide sequence portion
gcaaacauaacaaaaaaucccc

SEQ ID NO: 9162 - RNA, 22 nt, Artificial Sequence
  LDLR targeting guide sequence portion
gcaaacccugguugcuguauuu

SEQ ID NO: 9163 - RNA, 22 nt, Artificial Sequence
  LDLR targeting guide sequence portion
gcaaaggcuaaccuggcugucu

SEQ ID NO: 9164 - RNA, 22 nt, Artificial Sequence
  LDLR targeting guide sequence portion
gcaaaugccuccaagccauuca

SEQ ID NO: 9165 - RNA, 22 nt, Artificial Sequence
  LDLR targeting guide sequence portion
gcaacagaugaagacccuauuu

SEQ ID NO: 9166 - RNA, 22 nt, Artificial Sequence
  LDLR targeting guide sequence portion
gcaacaguaacacggcgauuuc

SEQ ID NO: 9167 - RNA, 22 nt, Artificial Sequence
  LDLR targeting guide sequence portion
gcaaccaggguuugcaaaaaua

SEQ ID NO: 9168 - RNA, 22 nt, Artificial Sequence
  LDLR targeting guide sequence portion
gcaacgcuuuuugggagaauga

SEQ ID NO: 9169 - RNA, 22 nt, Artificial Sequence
  LDLR targeting guide sequence portion
gcaagccuugcuagacagccag

SEQ ID NO: 9170 - RNA, 22 nt, Artificial Sequence
  LDLR targeting guide sequence portion
gcaaggagaccacgggaaugga

SEQ ID NO: 9171 - RNA, 22 nt, Artificial Sequence
  LDLR targeting guide sequence portion
gcaaggcuugcauagaagaggu

SEQ ID NO: 9172 - RNA, 22 nt, Artificial Sequence
  LDLR targeting guide sequence portion
gcaaguggcuuucaacacacaa

SEQ ID NO: 9173 - RNA, 22 nt, Artificial Sequence
  LDLR targeting guide sequence portion
gcaaugcuuuggucuucucugu

SEQ ID NO: 9174 - RNA, 22 nt, Artificial Sequence
  LDLR targeting guide sequence portion
gcaauggcuuggguugggauuu

SEQ ID NO: 9175 - RNA, 22 nt, Artificial Sequence
  LDLR targeting guide sequence portion
gcaauuguccccagggacaaaa

SEQ ID NO: 9176 - RNA, 22 nt, Artificial Sequence
  LDLR targeting guide sequence portion
gcacacaguccaguucgugcaa

SEQ ID NO: 9177 - RNA, 22 nt, Artificial Sequence
  LDLR targeting guide sequence portion
gcaccaacgggacccccuggcc

SEQ ID NO: 9178 - RNA, 22 nt, Artificial Sequence
  LDLR targeting guide sequence portion
gcaccaggcugguguccugaca

SEQ ID NO: 9179 - RNA, 22 nt, Artificial Sequence
  LDLR targeting guide sequence portion
gcacccagguguggcugucagg

SEQ ID NO: 9180 - RNA, 22 nt, Artificial Sequence
  LDLR targeting guide sequence portion
gcaccgagaccaaacucauuca

SEQ ID NO: 9181 - RNA, 22 nt, Artificial Sequence
  LDLR targeting guide sequence portion
gcaccugugucuggccaaauuc

SEQ ID NO: 9182 - RNA, 22 nt, Artificial Sequence
  LDLR targeting guide sequence portion
gcacgaacuggacugugugcaa

SEQ ID NO: 9183 - RNA, 22 nt, Artificial Sequence
  LDLR targeting guide sequence portion
gcacggugaggccgggcgcagu

SEQ ID NO: 9184 - RNA, 22 nt, Artificial Sequence
  LDLR targeting guide sequence portion
gcacguaaaugcgucccuguac

SEQ ID NO: 9185 - RNA, 22 nt, Artificial Sequence
  LDLR targeting guide sequence portion
gcacgugccaccguacccagcu

SEQ ID NO: 9186 - RNA, 22 nt, Artificial Sequence
  LDLR targeting guide sequence portion
gcacuaggugggcggacauaaa

SEQ ID NO: 9187 - RNA, 22 nt, Artificial Sequence
  LDLR targeting guide sequence portion
gcacugauguccggagagacag

SEQ ID NO: 9188 - RNA, 22 nt, Artificial Sequence
  LDLR targeting guide sequence portion
gcacuguccgaagccuguucug

SEQ ID NO: 9189 - RNA, 22 nt, Artificial Sequence
  LDLR targeting guide sequence portion
gcacuguuuucugucgugugug

SEQ ID NO: 9190 - RNA, 22 nt, Artificial Sequence
  LDLR targeting guide sequence portion
gcacuuaauaaauauuaagggu

SEQ ID NO: 9191 - RNA, 22 nt, Artificial Sequence
  LDLR targeting guide sequence portion
gcacuuucucaguucagaguug

SEQ ID NO: 9192 - RNA, 22 nt, Artificial Sequence
  LDLR targeting guide sequence portion
gcacuuugggaggcugagcugg

SEQ ID NO: 9193 - RNA, 22 nt, Artificial Sequence
  LDLR targeting guide sequence portion
gcacuuuguauauugguugaaa

SEQ ID NO: 9194 - RNA, 22 nt, Artificial Sequence
  LDLR targeting guide sequence portion
gcagaacaggcuucggacagug

SEQ ID NO: 9195 - RNA, 22 nt, Artificial Sequence
  LDLR targeting guide sequence portion
gcagagccugagucacugguca

SEQ ID NO: 9196 - RNA, 22 nt, Artificial Sequence
  LDLR targeting guide sequence portion
gcagauggcaccaacgggaccc

SEQ ID NO: 9197 - RNA, 22 nt, Artificial Sequence
  LDLR targeting guide sequence portion
gcagauguucacgccacgucau

SEQ ID NO: 9198 - RNA, 22 nt, Artificial Sequence
  LDLR targeting guide sequence portion
gcagcccauggccucuggccag

SEQ ID NO: 9199 - RNA, 22 nt, Artificial Sequence
  LDLR targeting guide sequence portion
gcaggcaaugcuuuggucuucu

SEQ ID NO: 9200 - RNA, 22 nt, Artificial Sequence
  LDLR targeting guide sequence portion
gcaggccacguguccucacggc

SEQ ID NO: 9201 - RNA, 22 nt, Artificial Sequence
  LDLR targeting guide sequence portion
gcagggaaccgugauaagccuu

SEQ ID NO: 9202 - RNA, 22 nt, Artificial Sequence
  LDLR targeting guide sequence portion
gcagggacgggacuccaggcag

SEQ ID NO: 9203 - RNA, 22 nt, Artificial Sequence
  LDLR targeting guide sequence portion
gcagggccagggggucccguug

SEQ ID NO: 9204 - RNA, 22 nt, Artificial Sequence
  LDLR targeting guide sequence portion
gcagguugaccgggacuucaaa

SEQ ID NO: 9205 - RNA, 22 nt, Artificial Sequence
  LDLR targeting guide sequence portion
gcaguggcauaaucauagcuca

SEQ ID NO: 9206 - RNA, 22 nt, Artificial Sequence
  LDLR targeting guide sequence portion
gcaguucucgauauucacgauc

SEQ ID NO: 9207 - RNA, 22 nt, Artificial Sequence
  LDLR targeting guide sequence portion
gcauaaucauagcucacgacag

SEQ ID NO: 9208 - RNA, 22 nt, Artificial Sequence
  LDLR targeting guide sequence portion
gcauagaagagguaaacacguu

SEQ ID NO: 9209 - RNA, 22 nt, Artificial Sequence
  LDLR targeting guide sequence portion
gcauagaaguggaagcacuagg

SEQ ID NO: 9210 - RNA, 22 nt, Artificial Sequence
  LDLR targeting guide sequence portion
gcaucagcagcccauggccucu

SEQ ID NO: 9211 - RNA, 22 nt, Artificial Sequence
  LDLR targeting guide sequence portion
gcaucauuuggugaaugaguuu

SEQ ID NO: 9212 - RNA, 22 nt, Artificial Sequence
  LDLR targeting guide sequence portion
gcauggcgaggcugagguggga

SEQ ID NO: 9213 - RNA, 22 nt, Artificial Sequence
  LDLR targeting guide sequence portion
gcaugggcacuguccgaagccu

SEQ ID NO: 9214 - RNA, 22 nt, Artificial Sequence
  LDLR targeting guide sequence portion
gcauggugcaucagcagcccau

SEQ ID NO: 9215 - RNA, 22 nt, Artificial Sequence
  LDLR targeting guide sequence portion
gcauguuuuaaacacauaccca

SEQ ID NO: 9216 - RNA, 22 nt, Artificial Sequence
  LDLR targeting guide sequence portion
gcauucauugacacgggcuuuc

SEQ ID NO: 9217 - RNA, 22 nt, Artificial Sequence
  LDLR targeting guide sequence portion
gcauugccugccagagcuuugu

SEQ ID NO: 9218 - RNA, 22 nt, Artificial Sequence
  LDLR targeting guide sequence portion
gcauuuacgugcuccgaaacca

SEQ ID NO: 9219 - RNA, 22 nt, Artificial Sequence
  LDLR targeting guide sequence portion
gcauuucagaggcaauaacccc

SEQ ID NO: 9220 - RNA, 22 nt, Artificial Sequence
  LDLR targeting guide sequence portion
gcauuugaggcugucgugagcu

SEQ ID NO: 9221 - RNA, 22 nt, Artificial Sequence
  LDLR targeting guide sequence portion
gcauuugcauagaaguggaagc

SEQ ID NO: 9222 - RNA, 22 nt, Artificial Sequence
  LDLR targeting guide sequence portion
gccaaaccccuaaacucaggag

SEQ ID NO: 9223 - RNA, 22 nt, Artificial Sequence
  LDLR targeting guide sequence portion
gccaaauguacacaguguacaa

SEQ ID NO: 9224 - RNA, 22 nt, Artificial Sequence
  LDLR targeting guide sequence portion
gccaaauucauuuuuuaagaga

SEQ ID NO: 9225 - RNA, 22 nt, Artificial Sequence
  LDLR targeting guide sequence portion
gccaagguaaccgggugucuca

SEQ ID NO: 9226 - RNA, 22 nt, Artificial Sequence
  LDLR targeting guide sequence portion
gccaaucccuugugacaucuuc

SEQ ID NO: 9227 - RNA, 22 nt, Artificial Sequence
  LDLR targeting guide sequence portion
gccacaccugggugcaggccac

SEQ ID NO: 9228 - RNA, 22 nt, Artificial Sequence
  LDLR targeting guide sequence portion
gccaccacggauucagccagau

SEQ ID NO: 9229 - RNA, 22 nt, Artificial Sequence
  LDLR targeting guide sequence portion
gccaccguacccagcugauuuu

SEQ ID NO: 9230 - RNA, 22 nt, Artificial Sequence
  LDLR targeting guide sequence portion
gccacgucauccuccagacuga

SEQ ID NO: 9231 - RNA, 22 nt, Artificial Sequence
  LDLR targeting guide sequence portion
gccacguguccucacggccaag

SEQ ID NO: 9232 - RNA, 22 nt, Artificial Sequence
  LDLR targeting guide sequence portion
gccacucauacauacaacgggg

SEQ ID NO: 9233 - RNA, 22 nt, Artificial Sequence
  LDLR targeting guide sequence portion
gccacugcgcccggccucaccg

SEQ ID NO: 9234 - RNA, 22 nt, Artificial Sequence
  LDLR targeting guide sequence portion
gccacuucccagaggcagagcc

SEQ ID NO: 9235 - RNA, 22 nt, Artificial Sequence
  LDLR targeting guide sequence portion
gccacuugcuucucugggccug

SEQ ID NO: 9236 - RNA, 22 nt, Artificial Sequence
  LDLR targeting guide sequence portion
gccagacacaggugccucacgc

SEQ ID NO: 9237 - RNA, 22 nt, Artificial Sequence
  LDLR targeting guide sequence portion
gccagaggccaugggcugcuga

SEQ ID NO: 9238 - RNA, 22 nt, Artificial Sequence
  LDLR targeting guide sequence portion
gccagaucauuuccgacgccau

SEQ ID NO: 9239 - RNA, 22 nt, Artificial Sequence
  LDLR targeting guide sequence portion
gccaggaaagggauucauggcg

SEQ ID NO: 9240 - RNA, 22 nt, Artificial Sequence
  LDLR targeting guide sequence portion
gccaggcauggcgaggcugagg

SEQ ID NO: 9241 - RNA, 22 nt, Artificial Sequence
  LDLR targeting guide sequence portion
gccagggaaagcccgugucaau

SEQ ID NO: 9242 - RNA, 22 nt, Artificial Sequence
  LDLR targeting guide sequence portion
gccagggggucccguuggugcc

SEQ ID NO: 9243 - RNA, 22 nt, Artificial Sequence
  LDLR targeting guide sequence portion
gccagguuagccuuugcccugu

SEQ ID NO: 9244 - RNA, 22 nt, Artificial Sequence
  LDLR targeting guide sequence portion
gccaucugcuguuguguguuga

SEQ ID NO: 9245 - RNA, 22 nt, Artificial Sequence
  LDLR targeting guide sequence portion
gccaugaaucccuuuccuggcu

SEQ ID NO: 9246 - RNA, 22 nt, Artificial Sequence
  LDLR targeting guide sequence portion
gccaugccuggccagaggccau

SEQ ID NO: 9247 - RNA, 22 nt, Artificial Sequence
  LDLR targeting guide sequence portion
gccaugggcugcugaugcacca

SEQ ID NO: 9248 - RNA, 22 nt, Artificial Sequence
  LDLR targeting guide sequence portion
gccauucacuuccccaaucuug

SEQ ID NO: 9249 - RNA, 22 nt, Artificial Sequence
  LDLR targeting guide sequence portion
gccauugcaugggcacuguccg

SEQ ID NO: 9250 - RNA, 22 nt, Artificial Sequence
  LDLR targeting guide sequence portion
gccauugucgucuuuauguccg

SEQ ID NO: 9251 - RNA, 22 nt, Artificial Sequence
  LDLR targeting guide sequence portion
gcccaccuagugcuuccacuuc

SEQ ID NO: 9252 - RNA, 22 nt, Artificial Sequence
  LDLR targeting guide sequence portion
gcccagaacccuuccugagacc

SEQ ID NO: 9253 - RNA, 22 nt, Artificial Sequence
  LDLR targeting guide sequence portion
gcccagagaagcaaguggcuuu

SEQ ID NO: 9254 - RNA, 22 nt, Artificial Sequence
  LDLR targeting guide sequence portion
gcccaggcuggaaagcaguggc

SEQ ID NO: 9255 - RNA, 22 nt, Artificial Sequence
  LDLR targeting guide sequence portion
gcccauccucccgaccccuacc

SEQ ID NO: 9256 - RNA, 22 nt, Artificial Sequence
  LDLR targeting guide sequence portion
gcccaugcaauggcuuggguug

SEQ ID NO: 9257 - RNA, 22 nt, Artificial Sequence
  LDLR targeting guide sequence portion
gcccauggccucuggccaggca

SEQ ID NO: 9258 - RNA, 22 nt, Artificial Sequence
  LDLR targeting guide sequence portion
gccccgagaauagucacugaac

SEQ ID NO: 9259 - RNA, 22 nt, Artificial Sequence
  LDLR targeting guide sequence portion
gccccucucuguccccggcauu

SEQ ID NO: 9260 - RNA, 22 nt, Artificial Sequence
  LDLR targeting guide sequence portion
gcccggccucaccgugcauguu

SEQ ID NO: 9261 - RNA, 22 nt, Artificial Sequence
  LDLR targeting guide sequence portion
gcccggggggaccaggaugaca

SEQ ID NO: 9262 - RNA, 22 nt, Artificial Sequence
  LDLR targeting guide sequence portion
gcccgugucaaugaaugccggg

SEQ ID NO: 9263 - RNA, 22 nt, Artificial Sequence
  LDLR targeting guide sequence portion
gcccugccucauccaccaaucu

SEQ ID NO: 9264 - RNA, 22 nt, Artificial Sequence
  LDLR targeting guide sequence portion
gcccugucacccccgaaucaug

SEQ ID NO: 9265 - RNA, 22 nt, Artificial Sequence
  LDLR targeting guide sequence portion
gcccuguguaggggguuauugc

SEQ ID NO: 9266 - RNA, 22 nt, Artificial Sequence
  LDLR targeting guide sequence portion
gccggccuuguuuuauucaaag

SEQ ID NO: 9267 - RNA, 22 nt, Artificial Sequence
  LDLR targeting guide sequence portion
gccggcgaggucucaggaaggg

SEQ ID NO: 9268 - RNA, 22 nt, Artificial Sequence
  LDLR targeting guide sequence portion
gccggggacagagaggggcagg

SEQ ID NO: 9269 - RNA, 22 nt, Artificial Sequence
  LDLR targeting guide sequence portion
gccgugaggacacguggccugc

SEQ ID NO: 9270 - RNA, 22 nt, Artificial Sequence
  LDLR targeting guide sequence portion
gccgugaucgugaauaucgaga

SEQ ID NO: 9271 - RNA, 22 nt, Artificial Sequence
  LDLR targeting guide sequence portion
gccguguuacuguugcacugau

SEQ ID NO: 9272 - RNA, 22 nt, Artificial Sequence
  LDLR targeting guide sequence portion
gccucaaaugccugagcucaaa

SEQ ID NO: 9273 - RNA, 22 nt, Artificial Sequence
  LDLR targeting guide sequence portion
gccucaccgugcauguuuuaaa

SEQ ID NO: 9274 - RNA, 22 nt, Artificial Sequence
  LDLR targeting guide sequence portion
gccucauccaccaaucucuaag

SEQ ID NO: 9275 - RNA, 22 nt, Artificial Sequence
  LDLR targeting guide sequence portion
gccuccaagccauucacuuccc

SEQ ID NO: 9276 - RNA, 22 nt, Artificial Sequence
  LDLR targeting guide sequence portion
gccucccagaugaauaaauaua

SEQ ID NO: 9277 - RNA, 22 nt, Artificial Sequence
  LDLR targeting guide sequence portion
gccuccgucagacucccgcgug

SEQ ID NO: 9278 - RNA, 22 nt, Artificial Sequence
  LDLR targeting guide sequence portion
gccucgccaugccuggccagag

SEQ ID NO: 9279 - RNA, 22 nt, Artificial Sequence
  LDLR targeting guide sequence portion
gccucugaaaugccucuucuuu

SEQ ID NO: 9280 - RNA, 22 nt, Artificial Sequence
  LDLR targeting guide sequence portion
gccucuggccaggcauggcgag

SEQ ID NO: 9281 - RNA, 22 nt, Artificial Sequence
  LDLR targeting guide sequence portion
gccucugggaaguggcaucauu

SEQ ID NO: 9282 - RNA, 22 nt, Artificial Sequence
  LDLR targeting guide sequence portion
gccugaaugucuuacugugauc

SEQ ID NO: 9283 - RNA, 22 nt, Artificial Sequence
  LDLR targeting guide sequence portion
gccugacauccccuccccuuuc

SEQ ID NO: 9284 - RNA, 22 nt, Artificial Sequence
  LDLR targeting guide sequence portion
gccugagacacccgguuaccuu

SEQ ID NO: 9285 - RNA, 22 nt, Artificial Sequence
  LDLR targeting guide sequence portion
gccugagcaacaaagcgagauc

SEQ ID NO: 9286 - RNA, 22 nt, Artificial Sequence
  LDLR targeting guide sequence portion
gccugagcucaaaccauccucc

SEQ ID NO: 9287 - RNA, 22 nt, Artificial Sequence
  LDLR targeting guide sequence portion
gccugagucacuggucacccuu

SEQ ID NO: 9288 - RNA, 22 nt, Artificial Sequence
  LDLR targeting guide sequence portion
gccugcacccagguguggcugu

SEQ ID NO: 9289 - RNA, 22 nt, Artificial Sequence
  LDLR targeting guide sequence portion
gccugccagagcuuuguuuuau

SEQ ID NO: 9290 - RNA, 22 nt, Artificial Sequence
  LDLR targeting guide sequence portion
gccuggagucccgucccugccc

SEQ ID NO: 9291 - RNA, 22 nt, Artificial Sequence
  LDLR targeting guide sequence portion
gccuggccagaggccaugggcu

SEQ ID NO: 9292 - RNA, 22 nt, Artificial Sequence
  LDLR targeting guide sequence portion
gccugggaucccaucccaacac

SEQ ID NO: 9293 - RNA, 22 nt, Artificial Sequence
  LDLR targeting guide sequence portion
gccuggugcccauccucccgac

SEQ ID NO: 9294 - RNA, 22 nt, Artificial Sequence
  LDLR targeting guide sequence portion
gccuguucugccucccagauga

SEQ ID NO: 9295 - RNA, 22 nt, Artificial Sequence
  LDLR targeting guide sequence portion
gccuguuucucuuauccuucac

SEQ ID NO: 9296 - RNA, 22 nt, Artificial Sequence
  LDLR targeting guide sequence portion
gccuugcuagacagccagguua

SEQ ID NO: 9297 - RNA, 22 nt, Artificial Sequence
  LDLR targeting guide sequence portion
gccuuguuuuauucaaagacag

SEQ ID NO: 9298 - RNA, 22 nt, Artificial Sequence
  LDLR targeting guide sequence portion
gccuuucugguuucggagcacg

SEQ ID NO: 9299 - RNA, 22 nt, Artificial Sequence
  LDLR targeting guide sequence portion
gccuuugcccugucacccccga

SEQ ID NO: 9300 - RNA, 22 nt, Artificial Sequence
  LDLR targeting guide sequence portion
gcgagaucccaucucuacaaaa

SEQ ID NO: 9301 - RNA, 22 nt, Artificial Sequence
  LDLR targeting guide sequence portion
gcgaggucucaggaaggguucu

SEQ ID NO: 9302 - RNA, 22 nt, Artificial Sequence
  LDLR targeting guide sequence portion
gcgauuucagaaagaaccugaa

SEQ ID NO: 9303 - RNA, 22 nt, Artificial Sequence
  LDLR targeting guide sequence portion
gcgcccggccucaccgugcaug

SEQ ID NO: 9304 - RNA, 22 nt, Artificial Sequence
  LDLR targeting guide sequence portion
gcggacauaaagacgacaaugg

SEQ ID NO: 9305 - RNA, 22 nt, Artificial Sequence
  LDLR targeting guide sequence portion
gcgggagucugacggaggcugu

SEQ ID NO: 9306 - RNA, 22 nt, Artificial Sequence
  LDLR targeting guide sequence portion
gcgucccuguacagauaguggg

SEQ ID NO: 9307 - RNA, 22 nt, Artificial Sequence
  LDLR targeting guide sequence portion
gcgucggaaaugaucuggcuga

SEQ ID NO: 9308 - RNA, 22 nt, Artificial Sequence
  LDLR targeting guide sequence portion
gcgugaacaucugccuggaguc

SEQ ID NO: 9309 - RNA, 22 nt, Artificial Sequence
  LDLR targeting guide sequence portion
gcgugaagaugucacaagggau

SEQ ID NO: 9310 - RNA, 22 nt, Artificial Sequence
  LDLR targeting guide sequence portion
gcgugagccacugcgcccggcc

SEQ ID NO: 9311 - RNA, 22 nt, Artificial Sequence
  LDLR targeting guide sequence portion
gcgugaggcaccugugucuggc

SEQ ID NO: 9312 - RNA, 22 nt, Artificial Sequence
  LDLR targeting guide sequence portion
gcguugcacacaguccaguucg

SEQ ID NO: 9313 - RNA, 22 nt, Artificial Sequence
  LDLR targeting guide sequence portion
gcuaaccuggcugucuagcaag

SEQ ID NO: 9314 - RNA, 22 nt, Artificial Sequence
  LDLR targeting guide sequence portion
gcuacaaaaaccuucuauacag

SEQ ID NO: 9315 - RNA, 22 nt, Artificial Sequence
  LDLR targeting guide sequence portion
gcuagacagccagguuagccuu

SEQ ID NO: 9316 - RNA, 22 nt, Artificial Sequence
  LDLR targeting guide sequence portion
gcuaugauuaugccacugcuuu

SEQ ID NO: 9317 - RNA, 22 nt, Artificial Sequence
  LDLR targeting guide sequence portion
gcucacgacagccucaaaugcc

SEQ ID NO: 9318 - RNA, 22 nt, Artificial Sequence
  LDLR targeting guide sequence portion
gcucaggcauuugaggcugucg

SEQ ID NO: 9319 - RNA, 22 nt, Artificial Sequence
  LDLR targeting guide sequence portion
gcucaggccuggucuccaacuc

SEQ ID NO: 9320 - RNA, 22 nt, Artificial Sequence
  LDLR targeting guide sequence portion
gcuccgaaaccagaaaggcuua

SEQ ID NO: 9321 - RNA, 22 nt, Artificial Sequence
  LDLR targeting guide sequence portion
gcucgaucauggcucacugcaa

SEQ ID NO: 9322 - RNA, 22 nt, Artificial Sequence
  LDLR targeting guide sequence portion
gcucugccucugggaaguggca

SEQ ID NO: 9323 - RNA, 22 nt, Artificial Sequence
  LDLR targeting guide sequence portion
gcucuggcaggcaaugcuuugg

SEQ ID NO: 9324 - RNA, 22 nt, Artificial Sequence
  LDLR targeting guide sequence portion
gcugaauccgugguggcaccga

SEQ ID NO: 9325 - RNA, 22 nt, Artificial Sequence
  LDLR targeting guide sequence portion
gcugagcuggaucacuugaguu

SEQ ID NO: 9326 - RNA, 22 nt, Artificial Sequence
  LDLR targeting guide sequence portion
gcugcugaugcaccaugcaugg

SEQ ID NO: 9327 - RNA, 22 nt, Artificial Sequence
  LDLR targeting guide sequence portion
gcuggaaagcaguggcauaauc

SEQ ID NO: 9328 - RNA, 22 nt, Artificial Sequence
  LDLR targeting guide sequence portion
gcuggaucacuugaguucagga

SEQ ID NO: 9329 - RNA, 22 nt, Artificial Sequence
  LDLR targeting guide sequence portion
gcugggauuacaggcgugaggc

SEQ ID NO: 9330 - RNA, 22 nt, Artificial Sequence
  LDLR targeting guide sequence portion
gcuggguacgguggcacgugcc

SEQ ID NO: 9331 - RNA, 22 nt, Artificial Sequence
  LDLR targeting guide sequence portion
gcugguguccugacagccacac

SEQ ID NO: 9332 - RNA, 22 nt, Artificial Sequence
  LDLR targeting guide sequence portion
gcuguauuuguucagugacuau

SEQ ID NO: 9333 - RNA, 22 nt, Artificial Sequence
  LDLR targeting guide sequence portion
gcugucacugucucuccggaca

SEQ ID NO: 9334 - RNA, 22 nt, Artificial Sequence
  LDLR targeting guide sequence portion
gcugucaggacaccagccuggu

SEQ ID NO: 9335 - RNA, 22 nt, Artificial Sequence
  LDLR targeting guide sequence portion
gcugucuagcaaggcuugcaua

SEQ ID NO: 9336 - RNA, 22 nt, Artificial Sequence
  LDLR targeting guide sequence portion
gcuguuguguguugaaagccac

SEQ ID NO: 9337 - RNA, 22 nt, Artificial Sequence
  LDLR targeting guide sequence portion
gcuuaaggaagguacaaaccca

SEQ ID NO: 9338 - RNA, 22 nt, Artificial Sequence
  LDLR targeting guide sequence portion
gcuuagagauugguggaugagg

SEQ ID NO: 9339 - RNA, 22 nt, Artificial Sequence
  LDLR targeting guide sequence portion
gcuuaucacgguucccugcacu

SEQ ID NO: 9340 - RNA, 22 nt, Artificial Sequence
  LDLR targeting guide sequence portion
gcuuccacuucuaugcaaaugc

SEQ ID NO: 9341 - RNA, 22 nt, Artificial Sequence
  LDLR targeting guide sequence portion
gcuucggacagugcccaugcaa

SEQ ID NO: 9342 - RNA, 22 nt, Artificial Sequence
  LDLR targeting guide sequence portion
gcuucucugggccugacauccc

SEQ ID NO: 9343 - RNA, 22 nt, Artificial Sequence
  LDLR targeting guide sequence portion
gcuucugggagaugggugucac

SEQ ID NO: 9344 - RNA, 22 nt, Artificial Sequence
  LDLR targeting guide sequence portion
gcuugcauagaagagguaaaca

SEQ ID NO: 9345 - RNA, 22 nt, Artificial Sequence
  LDLR targeting guide sequence portion
gcuuggaggcauuugcauagaa

SEQ ID NO: 9346 - RNA, 22 nt, Artificial Sequence
  LDLR targeting guide sequence portion
gcuuggguugggauuuugguuu

SEQ ID NO: 9347 - RNA, 22 nt, Artificial Sequence
  LDLR targeting guide sequence portion
gcuuucaacacacaacagcaga

SEQ ID NO: 9348 - RNA, 22 nt, Artificial Sequence
  LDLR targeting guide sequence portion
gcuuuccagccugggcaacaua

SEQ ID NO: 9349 - RNA, 22 nt, Artificial Sequence
  LDLR targeting guide sequence portion
gcuuucccuggccugggauccc

SEQ ID NO: 9350 - RNA, 22 nt, Artificial Sequence
  LDLR targeting guide sequence portion
gcuuugaagucccggucaaccu

SEQ ID NO: 9351 - RNA, 22 nt, Artificial Sequence
  LDLR targeting guide sequence portion
gcuuuggucuucucugucuuug

SEQ ID NO: 9352 - RNA, 22 nt, Artificial Sequence
  LDLR targeting guide sequence portion
gcuuuguugcucaggccugguc

SEQ ID NO: 9353 - RNA, 22 nt, Artificial Sequence
  LDLR targeting guide sequence portion
gcuuuuugggagaaugaugucc

SEQ ID NO: 9354 - RNA, 22 nt, Artificial Sequence
  LDLR targeting guide sequence portion
ggaaagcaguggcauaaucaua

SEQ ID NO: 9355 - RNA, 22 nt, Artificial Sequence
  LDLR targeting guide sequence portion
ggaaagcccgugucaaugaaug

SEQ ID NO: 9356 - RNA, 22 nt, Artificial Sequence
  LDLR targeting guide sequence portion
ggaaaggaagaaaccaaaaucc

SEQ ID NO: 9357 - RNA, 22 nt, Artificial Sequence
  LDLR targeting guide sequence portion
ggaaagggauucauggcgucgg

SEQ ID NO: 9358 - RNA, 22 nt, Artificial Sequence
  LDLR targeting guide sequence portion
ggaaaugaucuggcugaauccg

SEQ ID NO: 9359 - RNA, 22 nt, Artificial Sequence
  LDLR targeting guide sequence portion
ggaaccgugauaagccuuucug

SEQ ID NO: 9360 - RNA, 22 nt, Artificial Sequence
  LDLR targeting guide sequence portion
ggaagaaaccaaaaucccaacc

SEQ ID NO: 9361 - RNA, 22 nt, Artificial Sequence
  LDLR targeting guide sequence portion
ggaagaugaaaggggaggggau

SEQ ID NO: 9362 - RNA, 22 nt, Artificial Sequence
  LDLR targeting guide sequence portion
ggaagcacuaggugggcggaca

SEQ ID NO: 9363 - RNA, 22 nt, Artificial Sequence
  LDLR targeting guide sequence portion
ggaaggguucugggcagggacg

SEQ ID NO: 9364 - RNA, 22 nt, Artificial Sequence
  LDLR targeting guide sequence portion
ggaagguacaaacccaccucga

SEQ ID NO: 9365 - RNA, 22 nt, Artificial Sequence
  LDLR targeting guide sequence portion
ggaagugaauggcuuggaggca

SEQ ID NO: 9366 - RNA, 22 nt, Artificial Sequence
  LDLR targeting guide sequence portion
ggaaguggcaucauuuggugaa

SEQ ID NO: 9367 - RNA, 22 nt, Artificial Sequence
  LDLR targeting guide sequence portion
ggaaguggguaggggucgggag

SEQ ID NO: 9368 - RNA, 22 nt, Artificial Sequence
  LDLR targeting guide sequence portion
ggaaguuuugaguuucucucca

SEQ ID NO: 9369 - RNA, 22 nt, Artificial Sequence
  LDLR targeting guide sequence portion
ggaauggaaguggguagggguc

SEQ ID NO: 9370 - RNA, 22 nt, Artificial Sequence
  LDLR targeting guide sequence portion
ggacaauugccaaucccuugug

SEQ ID NO: 9371 - RNA, 22 nt, Artificial Sequence
  LDLR targeting guide sequence portion
ggacacaguguuuugucccugg

SEQ ID NO: 9372 - RNA, 22 nt, Artificial Sequence
  LDLR targeting guide sequence portion
ggacaccagccuggugcccauc

SEQ ID NO: 9373 - RNA, 22 nt, Artificial Sequence
  LDLR targeting guide sequence portion
ggacacguggccugcacccagg

SEQ ID NO: 9374 - RNA, 22 nt, Artificial Sequence
  LDLR targeting guide sequence portion
ggacagagaggggcagguugac

SEQ ID NO: 9375 - RNA, 22 nt, Artificial Sequence
  LDLR targeting guide sequence portion
ggacagugcccaugcaauggcu

SEQ ID NO: 9376 - RNA, 22 nt, Artificial Sequence
  LDLR targeting guide sequence portion
ggacauaaagacgacaauggca

SEQ ID NO: 9377 - RNA, 22 nt, Artificial Sequence
  LDLR targeting guide sequence portion
ggacaucagugcaacaguaaca

SEQ ID NO: 9378 - RNA, 22 nt, Artificial Sequence
  LDLR targeting guide sequence portion
ggacaucauucucccaaaaagc

SEQ ID NO: 9379 - RNA, 22 nt, Artificial Sequence
  LDLR targeting guide sequence portion
ggaccaggaugacaccuccauu

SEQ ID NO: 9380 - RNA, 22 nt, Artificial Sequence
  LDLR targeting guide sequence portion
ggacccccuggcccugccucau

SEQ ID NO: 9381 - RNA, 22 nt, Artificial Sequence
  LDLR targeting guide sequence portion
ggacgcauuuacgugcuccgaa

SEQ ID NO: 9382 - RNA, 22 nt, Artificial Sequence
  LDLR targeting guide sequence portion
ggacgggacuccaggcagaugu

SEQ ID NO: 9383 - RNA, 22 nt, Artificial Sequence
  LDLR targeting guide sequence portion
ggacuccaggcagauguucacg

SEQ ID NO: 9384 - RNA, 22 nt, Artificial Sequence
  LDLR targeting guide sequence portion
ggacugugugcaacgcuuuuug

SEQ ID NO: 9385 - RNA, 22 nt, Artificial Sequence
  LDLR targeting guide sequence portion
ggacuucaaagccgugaucgug

SEQ ID NO: 9386 - RNA, 22 nt, Artificial Sequence
  LDLR targeting guide sequence portion
ggacuucagguucuuucugaaa

SEQ ID NO: 9387 - RNA, 22 nt, Artificial Sequence
  LDLR targeting guide sequence portion
ggagaaugauguccccguugua

SEQ ID NO: 9388 - RNA, 22 nt, Artificial Sequence
  LDLR targeting guide sequence portion
ggagaccacgggaauggaagug

SEQ ID NO: 9389 - RNA, 22 nt, Artificial Sequence
  LDLR targeting guide sequence portion
ggagaccaggccugagcaacaa

SEQ ID NO: 9390 - RNA, 22 nt, Artificial Sequence
  LDLR targeting guide sequence portion
ggagagaaacucaaaacuuccu

SEQ ID NO: 9391 - RNA, 22 nt, Artificial Sequence
  LDLR targeting guide sequence portion
ggagagaaauggaggugucauc

SEQ ID NO: 9392 - RNA, 22 nt, Artificial Sequence
  LDLR targeting guide sequence portion
ggagagacagugacagccuccg

SEQ ID NO: 9393 - RNA, 22 nt, Artificial Sequence
  LDLR targeting guide sequence portion
ggagaugggugucacuuuuuaa

SEQ ID NO: 9394 - RNA, 22 nt, Artificial Sequence
  LDLR targeting guide sequence portion
ggagcacguaaaugcgucccug

SEQ ID NO: 9395 - RNA, 22 nt, Artificial Sequence
  LDLR targeting guide sequence portion
ggaggaugacguggcgugaaca

SEQ ID NO: 9396 - RNA, 22 nt, Artificial Sequence
  LDLR targeting guide sequence portion
ggaggaugggcaccaggcuggu

SEQ ID NO: 9397 - RNA, 22 nt, Artificial Sequence
  LDLR targeting guide sequence portion
ggaggaugguuugagcucaggc

SEQ ID NO: 9398 - RNA, 22 nt, Artificial Sequence
  LDLR targeting guide sequence portion
ggaggcagaacaggcuucggac

SEQ ID NO: 9399 - RNA, 22 nt, Artificial Sequence
  LDLR targeting guide sequence portion
ggaggcauuugcauagaagugg

SEQ ID NO: 9400 - RNA, 22 nt, Artificial Sequence
  LDLR targeting guide sequence portion
ggaggcugagcuggaucacuug

SEQ ID NO: 9401 - RNA, 22 nt, Artificial Sequence
  LDLR targeting guide sequence portion
ggaggcugucacugucucuccg

SEQ ID NO: 9402 - RNA, 22 nt, Artificial Sequence
  LDLR targeting guide sequence portion
ggaggggaugucaggcccagag

SEQ ID NO: 9403 - RNA, 22 nt, Artificial Sequence
  LDLR targeting guide sequence portion
ggaggugucauccugguccccc

SEQ ID NO: 9404 - RNA, 22 nt, Artificial Sequence
  LDLR targeting guide sequence portion
ggagguugcagugagccaugau

SEQ ID NO: 9405 - RNA, 22 nt, Artificial Sequence
  LDLR targeting guide sequence portion
ggagucaacguguuuaccucuu

SEQ ID NO: 9406 - RNA, 22 nt, Artificial Sequence
  LDLR targeting guide sequence portion
ggagucccgucccugcccagaa

SEQ ID NO: 9407 - RNA, 22 nt, Artificial Sequence
  LDLR targeting guide sequence portion
ggagucugacggaggcugucac

SEQ ID NO: 9408 - RNA, 22 nt, Artificial Sequence
  LDLR targeting guide sequence portion
ggaguuggagaccaggccugag

SEQ ID NO: 9409 - RNA, 22 nt, Artificial Sequence
  LDLR targeting guide sequence portion
ggauaagagaaacaggcccggg

SEQ ID NO: 9410 - RNA, 22 nt, Artificial Sequence
  LDLR targeting guide sequence portion
ggaucacaggcacgugccaccg

SEQ ID NO: 9411 - RNA, 22 nt, Artificial Sequence
  LDLR targeting guide sequence portion
ggaucccaggccagggaaagcc

SEQ ID NO: 9412 - RNA, 22 nt, Artificial Sequence
  LDLR targeting guide sequence portion
ggaucccaucccaacacacacg

SEQ ID NO: 9413 - RNA, 22 nt, Artificial Sequence
  LDLR targeting guide sequence portion
ggaucguuugacgggacuucag

SEQ ID NO: 9414 - RNA, 22 nt, Artificial Sequence
  LDLR targeting guide sequence portion
ggaugacaccuccauuucucuc

SEQ ID NO: 9415 - RNA, 22 nt, Artificial Sequence
  LDLR targeting guide sequence portion
ggaugacguggcgugaacaucu

SEQ ID NO: 9416 - RNA, 22 nt, Artificial Sequence
  LDLR targeting guide sequence portion
ggaugaggcagggccagggggu

SEQ ID NO: 9417 - RNA, 22 nt, Artificial Sequence
  LDLR targeting guide sequence portion
ggaugggaucccaggccaggga

SEQ ID NO: 9418 - RNA, 22 nt, Artificial Sequence
  LDLR targeting guide sequence portion
ggaugggcaccaggcugguguc

SEQ ID NO: 9419 - RNA, 22 nt, Artificial Sequence
  LDLR targeting guide sequence portion
ggaugguuugagcucaggcauu

SEQ ID NO: 9420 - RNA, 22 nt, Artificial Sequence
  LDLR targeting guide sequence portion
ggaugucaggcccagagaagca

SEQ ID NO: 9421 - RNA, 22 nt, Artificial Sequence
  LDLR targeting guide sequence portion
ggauuacaggcgugaggcaccu

SEQ ID NO: 9422 - RNA, 22 nt, Artificial Sequence
  LDLR targeting guide sequence portion
ggauucagccagaucauuuccg

SEQ ID NO: 9423 - RNA, 22 nt, Artificial Sequence
  LDLR targeting guide sequence portion
ggauucauggcgucggaaauga

SEQ ID NO: 9424 - RNA, 22 nt, Artificial Sequence
  LDLR targeting guide sequence portion
ggauuggcaauuguccccaggg

SEQ ID NO: 9425 - RNA, 22 nt, Artificial Sequence
  LDLR targeting guide sequence portion
ggauugugucacgguggagaga

SEQ ID NO: 9426 - RNA, 22 nt, Artificial Sequence
  LDLR targeting guide sequence portion
ggauuuugguuucuuccuuucc

SEQ ID NO: 9427 - RNA, 22 nt, Artificial Sequence
  LDLR targeting guide sequence portion
ggcaaaggcuaaccuggcuguc

SEQ ID NO: 9428 - RNA, 22 nt, Artificial Sequence
  LDLR targeting guide sequence portion
ggcaacagaugaagacccuauu

SEQ ID NO: 9429 - RNA, 22 nt, Artificial Sequence
  LDLR targeting guide sequence portion
ggcaauaacccccuacacaggg

SEQ ID NO: 9430 - RNA, 22 nt, Artificial Sequence
  LDLR targeting guide sequence portion
ggcaaugcuuuggucuucucug

SEQ ID NO: 9431 - RNA, 22 nt, Artificial Sequence
  LDLR targeting guide sequence portion
ggcaauuguccccagggacaaa

SEQ ID NO: 9432 - RNA, 22 nt, Artificial Sequence
  LDLR targeting guide sequence portion
ggcaccaacgggacccccuggc

SEQ ID NO: 9433 - RNA, 22 nt, Artificial Sequence
  LDLR targeting guide sequence portion
ggcaccaggcugguguccugac

SEQ ID NO: 9434 - RNA, 22 nt, Artificial Sequence
  LDLR targeting guide sequence portion
ggcaccgagaccaaacucauuc

SEQ ID NO: 9435 - RNA, 22 nt, Artificial Sequence
  LDLR targeting guide sequence portion
ggcaccugugucuggccaaauu

SEQ ID NO: 9436 - RNA, 22 nt, Artificial Sequence
  LDLR targeting guide sequence portion
ggcacgugccaccguacccagc

SEQ ID NO: 9437 - RNA, 22 nt, Artificial Sequence
  LDLR targeting guide sequence portion
ggcacuguccgaagccuguucu

SEQ ID NO: 9438 - RNA, 22 nt, Artificial Sequence
  LDLR targeting guide sequence portion
ggcacuuaauaaauauuaaggg

SEQ ID NO: 9439 - RNA, 22 nt, Artificial Sequence
  LDLR targeting guide sequence portion
ggcagaacaggcuucggacagu

SEQ ID NO: 9440 - RNA, 22 nt, Artificial Sequence
  LDLR targeting guide sequence portion
ggcagagccugagucacugguc

SEQ ID NO: 9441 - RNA, 22 nt, Artificial Sequence
  LDLR targeting guide sequence portion
ggcagauguucacgccacguca

SEQ ID NO: 9442 - RNA, 22 nt, Artificial Sequence
  LDLR targeting guide sequence portion
ggcaggcaaugcuuuggucuuc

SEQ ID NO: 9443 - RNA, 22 nt, Artificial Sequence
  LDLR targeting guide sequence portion
ggcagggacgggacuccaggca

SEQ ID NO: 9444 - RNA, 22 nt, Artificial Sequence
  LDLR targeting guide sequence portion
ggcagggccagggggucccguu

SEQ ID NO: 9445 - RNA, 22 nt, Artificial Sequence
  LDLR targeting guide sequence portion
ggcagguugaccgggacuucaa

SEQ ID NO: 9446 - RNA, 22 nt, Artificial Sequence
  LDLR targeting guide sequence portion
ggcaguucucgauauucacgau

SEQ ID NO: 9447 - RNA, 22 nt, Artificial Sequence
  LDLR targeting guide sequence portion
ggcauaaucauagcucacgaca

SEQ ID NO: 9448 - RNA, 22 nt, Artificial Sequence
  LDLR targeting guide sequence portion
ggcaucauuuggugaaugaguu

SEQ ID NO: 9449 - RNA, 22 nt, Artificial Sequence
  LDLR targeting guide sequence portion
ggcauggcgaggcugagguggg

SEQ ID NO: 9450 - RNA, 22 nt, Artificial Sequence
  LDLR targeting guide sequence portion
ggcauucauugacacgggcuuu

SEQ ID NO: 9451 - RNA, 22 nt, Artificial Sequence
  LDLR targeting guide sequence portion
ggcauuucagaggcaauaaccc

SEQ ID NO: 9452 - RNA, 22 nt, Artificial Sequence
  LDLR targeting guide sequence portion
ggcauuugaggcugucgugagc

SEQ ID NO: 9453 - RNA, 22 nt, Artificial Sequence
  LDLR targeting guide sequence portion
ggcauuugcauagaaguggaag

SEQ ID NO: 9454 - RNA, 22 nt, Artificial Sequence
  LDLR targeting guide sequence portion
ggcauuuguguuauuauuuugc

SEQ ID NO: 9455 - RNA, 22 nt, Artificial Sequence
  LDLR targeting guide sequence portion
ggccaaauucauuuuuuaagag

SEQ ID NO: 9456 - RNA, 22 nt, Artificial Sequence
  LDLR targeting guide sequence portion
ggccaagguaaccgggugucuc

SEQ ID NO: 9457 - RNA, 22 nt, Artificial Sequence
  LDLR targeting guide sequence portion
ggccacguguccucacggccaa

SEQ ID NO: 9458 - RNA, 22 nt, Artificial Sequence
  LDLR targeting guide sequence portion
ggccagacacaggugccucacg

SEQ ID NO: 9459 - RNA, 22 nt, Artificial Sequence
  LDLR targeting guide sequence portion
ggccagaggccaugggcugcug

SEQ ID NO: 9460 - RNA, 22 nt, Artificial Sequence
  LDLR targeting guide sequence portion
ggccaggcauggcgaggcugag

SEQ ID NO: 9461 - RNA, 22 nt, Artificial Sequence
  LDLR targeting guide sequence portion
ggccagggaaagcccgugucaa

SEQ ID NO: 9462 - RNA, 22 nt, Artificial Sequence
  LDLR targeting guide sequence portion
ggccagggggucccguuggugc

SEQ ID NO: 9463 - RNA, 22 nt, Artificial Sequence
  LDLR targeting guide sequence portion
ggccaugggcugcugaugcacc

SEQ ID NO: 9464 - RNA, 22 nt, Artificial Sequence
  LDLR targeting guide sequence portion
ggcccagagaagcaaguggcuu

SEQ ID NO: 9465 - RNA, 22 nt, Artificial Sequence
  LDLR targeting guide sequence portion
ggccccgagaauagucacugaa

SEQ ID NO: 9466 - RNA, 22 nt, Artificial Sequence
  LDLR targeting guide sequence portion
ggcccggggggaccaggaugac

SEQ ID NO: 9467 - RNA, 22 nt, Artificial Sequence
  LDLR targeting guide sequence portion
ggcccugccucauccaccaauc

SEQ ID NO: 9468 - RNA, 22 nt, Artificial Sequence
  LDLR targeting guide sequence portion
ggcccuguguaggggguuauug

SEQ ID NO: 9469 - RNA, 22 nt, Artificial Sequence
  LDLR targeting guide sequence portion
ggccggcgaggucucaggaagg

SEQ ID NO: 9470 - RNA, 22 nt, Artificial Sequence
  LDLR targeting guide sequence portion
ggccgugaggacacguggccug

SEQ ID NO: 9471 - RNA, 22 nt, Artificial Sequence
  LDLR targeting guide sequence portion
ggccucaccgugcauguuuuaa

SEQ ID NO: 9472 - RNA, 22 nt, Artificial Sequence
  LDLR targeting guide sequence portion
ggccucuggccaggcauggcga

SEQ ID NO: 9473 - RNA, 22 nt, Artificial Sequence
  LDLR targeting guide sequence portion
ggccugacauccccuccccuuu

SEQ ID NO: 9474 - RNA, 22 nt, Artificial Sequence
  LDLR targeting guide sequence portion
ggccugagcaacaaagcgagau

SEQ ID NO: 9475 - RNA, 22 nt, Artificial Sequence
  LDLR targeting guide sequence portion
ggccugcacccagguguggcug

SEQ ID NO: 9476 - RNA, 22 nt, Artificial Sequence
  LDLR targeting guide sequence portion
ggccugggaucccaucccaaca

SEQ ID NO: 9477 - RNA, 22 nt, Artificial Sequence
  LDLR targeting guide sequence portion
ggccuggucuccaacuccugaa

SEQ ID NO: 9478 - RNA, 22 nt, Artificial Sequence
  LDLR targeting guide sequence portion
ggccuguuucucuuauccuuca

SEQ ID NO: 9479 - RNA, 22 nt, Artificial Sequence
  LDLR targeting guide sequence portion
ggccuuguuuuauucaaagaca

SEQ ID NO: 9480 - RNA, 22 nt, Artificial Sequence
  LDLR targeting guide sequence portion
ggcgaggcugaggugggaggau

SEQ ID NO: 9481 - RNA, 22 nt, Artificial Sequence
  LDLR targeting guide sequence portion
ggcgaggucucaggaaggguuc

SEQ ID NO: 9482 - RNA, 22 nt, Artificial Sequence
  LDLR targeting guide sequence portion
ggcgauuucagaaagaaccuga

SEQ ID NO: 9483 - RNA, 22 nt, Artificial Sequence
  LDLR targeting guide sequence portion
ggcggacauaaagacgacaaug

SEQ ID NO: 9484 - RNA, 22 nt, Artificial Sequence
  LDLR targeting guide sequence portion
ggcgucggaaaugaucuggcug

SEQ ID NO: 9485 - RNA, 22 nt, Artificial Sequence
  LDLR targeting guide sequence portion
ggcgugaacaucugccuggagu

SEQ ID NO: 9486 - RNA, 22 nt, Artificial Sequence
  LDLR targeting guide sequence portion
ggcgugaggcaccugugucugg

SEQ ID NO: 9487 - RNA, 22 nt, Artificial Sequence
  LDLR targeting guide sequence portion
ggcuaaccuggcugucuagcaa

SEQ ID NO: 9488 - RNA, 22 nt, Artificial Sequence
  LDLR targeting guide sequence portion
ggcuacaaaaaccuucuauaca

SEQ ID NO: 9489 - RNA, 22 nt, Artificial Sequence
  LDLR targeting guide sequence portion
ggcucgaucauggcucacugca

SEQ ID NO: 9490 - RNA, 22 nt, Artificial Sequence
  LDLR targeting guide sequence portion
ggcucugccucugggaaguggc

SEQ ID NO: 9491 - RNA, 22 nt, Artificial Sequence
  LDLR targeting guide sequence portion
ggcugaauccgugguggcaccg

SEQ ID NO: 9492 - RNA, 22 nt, Artificial Sequence
  LDLR targeting guide sequence portion
ggcugagcuggaucacuugagu

SEQ ID NO: 9493 - RNA, 22 nt, Artificial Sequence
  LDLR targeting guide sequence portion
ggcugcugaugcaccaugcaug

SEQ ID NO: 9494 - RNA, 22 nt, Artificial Sequence
  LDLR targeting guide sequence portion
ggcuggaaagcaguggcauaau

SEQ ID NO: 9495 - RNA, 22 nt, Artificial Sequence
  LDLR targeting guide sequence portion
ggcugguguccugacagccaca

SEQ ID NO: 9496 - RNA, 22 nt, Artificial Sequence
  LDLR targeting guide sequence portion
ggcugucacugucucuccggac

SEQ ID NO: 9497 - RNA, 22 nt, Artificial Sequence
  LDLR targeting guide sequence portion
ggcugucaggacaccagccugg

SEQ ID NO: 9498 - RNA, 22 nt, Artificial Sequence
  LDLR targeting guide sequence portion
ggcugucuagcaaggcuugcau

SEQ ID NO: 9499 - RNA, 22 nt, Artificial Sequence
  LDLR targeting guide sequence portion
ggcuuaaggaagguacaaaccc

SEQ ID NO: 9500 - RNA, 22 nt, Artificial Sequence
  LDLR targeting guide sequence portion
ggcuuagagauugguggaugag

SEQ ID NO: 9501 - RNA, 22 nt, Artificial Sequence
  LDLR targeting guide sequence portion
ggcuuaucacgguucccugcac

SEQ ID NO: 9502 - RNA, 22 nt, Artificial Sequence
  LDLR targeting guide sequence portion
ggcuucggacagugcccaugca

SEQ ID NO: 9503 - RNA, 22 nt, Artificial Sequence
  LDLR targeting guide sequence portion
ggcuucugggagauggguguca

SEQ ID NO: 9504 - RNA, 22 nt, Artificial Sequence
  LDLR targeting guide sequence portion
ggcuugcauagaagagguaaac

SEQ ID NO: 9505 - RNA, 22 nt, Artificial Sequence
  LDLR targeting guide sequence portion
ggcuuggaggcauuugcauaga

SEQ ID NO: 9506 - RNA, 22 nt, Artificial Sequence
  LDLR targeting guide sequence portion
ggcuuggguugggauuuugguu

SEQ ID NO: 9507 - RNA, 22 nt, Artificial Sequence
  LDLR targeting guide sequence portion
ggcuuucaacacacaacagcag

SEQ ID NO: 9508 - RNA, 22 nt, Artificial Sequence
  LDLR targeting guide sequence portion
ggcuuucccuggccugggaucc

SEQ ID NO: 9509 - RNA, 22 nt, Artificial Sequence
  LDLR targeting guide sequence portion
ggcuuugaagucccggucaacc

SEQ ID NO: 9510 - RNA, 22 nt, Artificial Sequence
  LDLR targeting guide sequence portion
gggaaagcccgugucaaugaau

SEQ ID NO: 9511 - RNA, 22 nt, Artificial Sequence
  LDLR targeting guide sequence portion
gggaaccgugauaagccuuucu

SEQ ID NO: 9512 - RNA, 22 nt, Artificial Sequence
  LDLR targeting guide sequence portion
gggaagugaauggcuuggaggc

SEQ ID NO: 9513 - RNA, 22 nt, Artificial Sequence
  LDLR targeting guide sequence portion
gggaaguggcaucauuugguga

SEQ ID NO: 9514 - RNA, 22 nt, Artificial Sequence
  LDLR targeting guide sequence portion
gggaauggaaguggguaggggu

SEQ ID NO: 9515 - RNA, 22 nt, Artificial Sequence
  LDLR targeting guide sequence portion
gggacaauugccaaucccuugu

SEQ ID NO: 9516 - RNA, 22 nt, Artificial Sequence
  LDLR targeting guide sequence portion
gggacacaguguuuugucccug

SEQ ID NO: 9517 - RNA, 22 nt, Artificial Sequence
  LDLR targeting guide sequence portion
gggacagagaggggcagguuga

SEQ ID NO: 9518 - RNA, 22 nt, Artificial Sequence
  LDLR targeting guide sequence portion
gggacaucauucucccaaaaag

SEQ ID NO: 9519 - RNA, 22 nt, Artificial Sequence
  LDLR targeting guide sequence portion
gggaccaggaugacaccuccau

SEQ ID NO: 9520 - RNA, 22 nt, Artificial Sequence
  LDLR targeting guide sequence portion
gggacccccuggcccugccuca

SEQ ID NO: 9521 - RNA, 22 nt, Artificial Sequence
  LDLR targeting guide sequence portion
gggacgcauuuacgugcuccga

SEQ ID NO: 9522 - RNA, 22 nt, Artificial Sequence
  LDLR targeting guide sequence portion
gggacgggacuccaggcagaug

SEQ ID NO: 9523 - RNA, 22 nt, Artificial Sequence
  LDLR targeting guide sequence portion
gggacuccaggcagauguucac

SEQ ID NO: 9524 - RNA, 22 nt, Artificial Sequence
  LDLR targeting guide sequence portion
gggacuucaaagccgugaucgu

SEQ ID NO: 9525 - RNA, 22 nt, Artificial Sequence
  LDLR targeting guide sequence portion
gggacuucagguucuuucugaa

SEQ ID NO: 9526 - RNA, 22 nt, Artificial Sequence
  LDLR targeting guide sequence portion
gggagaaugauguccccguugu

SEQ ID NO: 9527 - RNA, 22 nt, Artificial Sequence
  LDLR targeting guide sequence portion
gggagaugggugucacuuuuua

SEQ ID NO: 9528 - RNA, 22 nt, Artificial Sequence
  LDLR targeting guide sequence portion
gggaggaugggcaccaggcugg

SEQ ID NO: 9529 - RNA, 22 nt, Artificial Sequence
  LDLR targeting guide sequence portion
gggaggaugguuugagcucagg

SEQ ID NO: 9530 - RNA, 22 nt, Artificial Sequence
  LDLR targeting guide sequence portion
gggaggcagaacaggcuucgga

SEQ ID NO: 9531 - RNA, 22 nt, Artificial Sequence
  LDLR targeting guide sequence portion
gggaggcugagcuggaucacuu

SEQ ID NO: 9532 - RNA, 22 nt, Artificial Sequence
  LDLR targeting guide sequence portion
gggaggggaugucaggcccaga

SEQ ID NO: 9533 - RNA, 22 nt, Artificial Sequence
  LDLR targeting guide sequence portion
gggagucugacggaggcuguca

SEQ ID NO: 9534 - RNA, 22 nt, Artificial Sequence
  LDLR targeting guide sequence portion
gggaucacaggcacgugccacc

SEQ ID NO: 9535 - RNA, 22 nt, Artificial Sequence
  LDLR targeting guide sequence portion
gggaucccaggccagggaaagc

SEQ ID NO: 9536 - RNA, 22 nt, Artificial Sequence
  LDLR targeting guide sequence portion
gggaucccaucccaacacacac

SEQ ID NO: 9537 - RNA, 22 nt, Artificial Sequence
  LDLR targeting guide sequence portion
gggaucucgcuuuguugcucag

SEQ ID NO: 9538 - RNA, 22 nt, Artificial Sequence
  LDLR targeting guide sequence portion
gggaugggaucccaggccaggg

SEQ ID NO: 9539 - RNA, 22 nt, Artificial Sequence
  LDLR targeting guide sequence portion
gggaugucaggcccagagaagc

SEQ ID NO: 9540 - RNA, 22 nt, Artificial Sequence
  LDLR targeting guide sequence portion
gggauuacaggcgugaggcacc

SEQ ID NO: 9541 - RNA, 22 nt, Artificial Sequence
  LDLR targeting guide sequence portion
gggauucauggcgucggaaaug

SEQ ID NO: 9542 - RNA, 22 nt, Artificial Sequence
  LDLR targeting guide sequence portion
gggauuggcaauuguccccagg

SEQ ID NO: 9543 - RNA, 22 nt, Artificial Sequence
  LDLR targeting guide sequence portion
gggauuuugguuucuuccuuuc

SEQ ID NO: 9544 - RNA, 22 nt, Artificial Sequence
  LDLR targeting guide sequence portion
gggauuuuuuguuauguuugca

SEQ ID NO: 9545 - RNA, 22 nt, Artificial Sequence
  LDLR targeting guide sequence portion
gggcaaaggcuaaccuggcugu

SEQ ID NO: 9546 - RNA, 22 nt, Artificial Sequence
  LDLR targeting guide sequence portion
gggcaacagaugaagacccuau

SEQ ID NO: 9547 - RNA, 22 nt, Artificial Sequence
  LDLR targeting guide sequence portion
gggcaccaggcugguguccuga

SEQ ID NO: 9548 - RNA, 22 nt, Artificial Sequence
  LDLR targeting guide sequence portion
gggcacuguccgaagccuguuc

SEQ ID NO: 9549 - RNA, 22 nt, Artificial Sequence
  LDLR targeting guide sequence portion
gggcagggacgggacuccaggc

SEQ ID NO: 9550 - RNA, 22 nt, Artificial Sequence
  LDLR targeting guide sequence portion
gggcagguugaccgggacuuca

SEQ ID NO: 9551 - RNA, 22 nt, Artificial Sequence
  LDLR targeting guide sequence portion
gggccagggggucccguuggug

SEQ ID NO: 9552 - RNA, 22 nt, Artificial Sequence
  LDLR targeting guide sequence portion
gggccccgagaauagucacuga

SEQ ID NO: 9553 - RNA, 22 nt, Artificial Sequence
  LDLR targeting guide sequence portion
gggcccuguguaggggguuauu

SEQ ID NO: 9554 - RNA, 22 nt, Artificial Sequence
  LDLR targeting guide sequence portion
gggccugacauccccuccccuu

SEQ ID NO: 9555 - RNA, 22 nt, Artificial Sequence
  LDLR targeting guide sequence portion
gggccuguuucucuuauccuuc

SEQ ID NO: 9556 - RNA, 22 nt, Artificial Sequence
  LDLR targeting guide sequence portion
gggcggacauaaagacgacaau

SEQ ID NO: 9557 - RNA, 22 nt, Artificial Sequence
  LDLR targeting guide sequence portion
gggcugcugaugcaccaugcau

SEQ ID NO: 9558 - RNA, 22 nt, Artificial Sequence
  LDLR targeting guide sequence portion
gggcuuucccuggccugggauc

SEQ ID NO: 9559 - RNA, 22 nt, Artificial Sequence
  LDLR targeting guide sequence portion
ggggaagugaauggcuuggagg

SEQ ID NO: 9560 - RNA, 22 nt, Artificial Sequence
  LDLR targeting guide sequence portion
ggggacaauugccaaucccuug

SEQ ID NO: 9561 - RNA, 22 nt, Artificial Sequence
  LDLR targeting guide sequence portion
ggggacacaguguuuugucccu

SEQ ID NO: 9562 - RNA, 22 nt, Artificial Sequence
  LDLR targeting guide sequence portion
ggggacagagaggggcagguug

SEQ ID NO: 9563 - RNA, 22 nt, Artificial Sequence
  LDLR targeting guide sequence portion
ggggacaucauucucccaaaaa

SEQ ID NO: 9564 - RNA, 22 nt, Artificial Sequence
  LDLR targeting guide sequence portion
ggggaccaggaugacaccucca

SEQ ID NO: 9565 - RNA, 22 nt, Artificial Sequence
  LDLR targeting guide sequence portion
ggggaggggaugucaggcccag

SEQ ID NO: 9566 - RNA, 22 nt, Artificial Sequence
  LDLR targeting guide sequence portion
ggggaugucaggcccagagaag

SEQ ID NO: 9567 - RNA, 22 nt, Artificial Sequence
  LDLR targeting guide sequence portion
ggggauuuuuuguuauguuugc

SEQ ID NO: 9568 - RNA, 22 nt, Artificial Sequence
  LDLR targeting guide sequence portion
ggggcagguugaccgggacuuc

SEQ ID NO: 9569 - RNA, 22 nt, Artificial Sequence
  LDLR targeting guide sequence portion
ggggcccuguguaggggguuau

SEQ ID NO: 9570 - RNA, 22 nt, Artificial Sequence
  LDLR targeting guide sequence portion
gggggacacaguguuuuguccc

SEQ ID NO: 9571 - RNA, 22 nt, Artificial Sequence
  LDLR targeting guide sequence portion
gggggaccaggaugacaccucc

SEQ ID NO: 9572 - RNA, 22 nt, Artificial Sequence
  LDLR targeting guide sequence portion
ggggggacacaguguuuugucc

SEQ ID NO: 9573 - RNA, 22 nt, Artificial Sequence
  LDLR targeting guide sequence portion
ggggggaccaggaugacaccuc

SEQ ID NO: 9574 - RNA, 22 nt, Artificial Sequence
  LDLR targeting guide sequence portion
gggggucccguuggugccaucu

SEQ ID NO: 9575 - RNA, 22 nt, Artificial Sequence
  LDLR targeting guide sequence portion
gggggugacagggcaaaggcua

SEQ ID NO: 9576 - RNA, 22 nt, Artificial Sequence
  LDLR targeting guide sequence portion
ggggguuauugccucugaaaug

SEQ ID NO: 9577 - RNA, 22 nt, Artificial Sequence
  LDLR targeting guide sequence portion
ggggucccguuggugccaucug

SEQ ID NO: 9578 - RNA, 22 nt, Artificial Sequence
  LDLR targeting guide sequence portion
ggggucgggaggaugggcacca

SEQ ID NO: 9579 - RNA, 22 nt, Artificial Sequence
  LDLR targeting guide sequence portion
ggggugacagggcaaaggcuaa

SEQ ID NO: 9580 - RNA, 22 nt, Artificial Sequence
  LDLR targeting guide sequence portion
gggguuauugccucugaaaugc

SEQ ID NO: 9581 - RNA, 22 nt, Artificial Sequence
  LDLR targeting guide sequence portion
gggguuuggcuuagagauuggu

SEQ ID NO: 9582 - RNA, 22 nt, Artificial Sequence
  LDLR targeting guide sequence portion
ggguacgguggcacgugccugu

SEQ ID NO: 9583 - RNA, 22 nt, Artificial Sequence
  LDLR targeting guide sequence portion
ggguaggggucgggaggauggg

SEQ ID NO: 9584 - RNA, 22 nt, Artificial Sequence
  LDLR targeting guide sequence portion
ggguauguguuuaaaacaugca

SEQ ID NO: 9585 - RNA, 22 nt, Artificial Sequence
  LDLR targeting guide sequence portion
gggucaugauucgggggugaca

SEQ ID NO: 9586 - RNA, 22 nt, Artificial Sequence
  LDLR targeting guide sequence portion
gggucccguuggugccaucugc

SEQ ID NO: 9587 - RNA, 22 nt, Artificial Sequence
  LDLR targeting guide sequence portion
gggucgggaggaugggcaccag

SEQ ID NO: 9588 - RNA, 22 nt, Artificial Sequence
  LDLR targeting guide sequence portion
gggugacagggcaaaggcuaac

SEQ ID NO: 9589 - RNA, 22 nt, Artificial Sequence
  LDLR targeting guide sequence portion
gggugaccagugacucaggcuc

SEQ ID NO: 9590 - RNA, 22 nt, Artificial Sequence
  LDLR targeting guide sequence portion
gggugcaggccacguguccuca

SEQ ID NO: 9591 - RNA, 22 nt, Artificial Sequence
  LDLR targeting guide sequence portion
gggugggucaugauucgggggu

SEQ ID NO: 9592 - RNA, 22 nt, Artificial Sequence
  LDLR targeting guide sequence portion
gggugucacuuuuuaaaccacu

SEQ ID NO: 9593 - RNA, 22 nt, Artificial Sequence
  LDLR targeting guide sequence portion
gggugucucaggcacuuaauaa

SEQ ID NO: 9594 - RNA, 22 nt, Artificial Sequence
  LDLR targeting guide sequence portion
ggguuauugccucugaaaugcc

SEQ ID NO: 9595 - RNA, 22 nt, Artificial Sequence
  LDLR targeting guide sequence portion
ggguucugggcagggacgggac

SEQ ID NO: 9596 - RNA, 22 nt, Artificial Sequence
  LDLR targeting guide sequence portion
ggguugggauuuugguuucuuc

SEQ ID NO: 9597 - RNA, 22 nt, Artificial Sequence
  LDLR targeting guide sequence portion
ggguuuggcuuagagauuggug

SEQ ID NO: 9598 - RNA, 22 nt, Artificial Sequence
  LDLR targeting guide sequence portion
ggguuuguaccuuccuuaagcc

SEQ ID NO: 9599 - RNA, 22 nt, Artificial Sequence
  LDLR targeting guide sequence portion
gguaaacacguugacuccugag

SEQ ID NO: 9600 - RNA, 22 nt, Artificial Sequence
  LDLR targeting guide sequence portion
gguaaccgggugucucaggcac

SEQ ID NO: 9601 - RNA, 22 nt, Artificial Sequence
  LDLR targeting guide sequence portion
gguacaaacccaccucgaaaga

SEQ ID NO: 9602 - RNA, 22 nt, Artificial Sequence
  LDLR targeting guide sequence portion
gguaggggucgggaggaugggc

SEQ ID NO: 9603 - RNA, 22 nt, Artificial Sequence
  LDLR targeting guide sequence portion
gguauguguuuaaaacaugcac

SEQ ID NO: 9604 - RNA, 22 nt, Artificial Sequence
  LDLR targeting guide sequence portion
ggucaaccugccccucucuguc

SEQ ID NO: 9605 - RNA, 22 nt, Artificial Sequence
  LDLR targeting guide sequence portion
ggucacccuuaauauuuauuaa

SEQ ID NO: 9606 - RNA, 22 nt, Artificial Sequence
  LDLR targeting guide sequence portion
ggucagucuggaggaugacgug

SEQ ID NO: 9607 - RNA, 22 nt, Artificial Sequence
  LDLR targeting guide sequence portion
ggucaugauucgggggugacag

SEQ ID NO: 9608 - RNA, 22 nt, Artificial Sequence
  LDLR targeting guide sequence portion
gguccccccgggccuguuucuc

SEQ ID NO: 9609 - RNA, 22 nt, Artificial Sequence
  LDLR targeting guide sequence portion
ggucccguuggugccaucugcu

SEQ ID NO: 9610 - RNA, 22 nt, Artificial Sequence
  LDLR targeting guide sequence portion
ggucgggaggaugggcaccagg

SEQ ID NO: 9611 - RNA, 22 nt, Artificial Sequence
  LDLR targeting guide sequence portion
ggucucaggaaggguucugggc

SEQ ID NO: 9612 - RNA, 22 nt, Artificial Sequence
  LDLR targeting guide sequence portion
ggucuccuugcacuuucucagu

SEQ ID NO: 9613 - RNA, 22 nt, Artificial Sequence
  LDLR targeting guide sequence portion
ggucucggugccaccacggauu

SEQ ID NO: 9614 - RNA, 22 nt, Artificial Sequence
  LDLR targeting guide sequence portion
ggucuucucugucuuugaauaa

SEQ ID NO: 9615 - RNA, 22 nt, Artificial Sequence
  LDLR targeting guide sequence portion
ggugaaugaguuuggucucggu

SEQ ID NO: 9616 - RNA, 22 nt, Artificial Sequence
  LDLR targeting guide sequence portion
ggugacagggcaaaggcuaacc

SEQ ID NO: 9617 - RNA, 22 nt, Artificial Sequence
  LDLR targeting guide sequence portion
ggugaccagugacucaggcucu

SEQ ID NO: 9618 - RNA, 22 nt, Artificial Sequence
  LDLR targeting guide sequence portion
ggugcaggccacguguccucac

SEQ ID NO: 9619 - RNA, 22 nt, Artificial Sequence
  LDLR targeting guide sequence portion
ggugcaucagcagcccauggcc

SEQ ID NO: 9620 - RNA, 22 nt, Artificial Sequence
  LDLR targeting guide sequence portion
ggugccaccacggauucagcca

SEQ ID NO: 9621 - RNA, 22 nt, Artificial Sequence
  LDLR targeting guide sequence portion
ggugccaucugcuguugugugu

SEQ ID NO: 9622 - RNA, 22 nt, Artificial Sequence
  LDLR targeting guide sequence portion
ggugcccauccucccgaccccu

SEQ ID NO: 9623 - RNA, 22 nt, Artificial Sequence
  LDLR targeting guide sequence portion
gguggagagaaacucaaaacuu

SEQ ID NO: 9624 - RNA, 22 nt, Artificial Sequence
  LDLR targeting guide sequence portion
gguggagguugcagugagccau

SEQ ID NO: 9625 - RNA, 22 nt, Artificial Sequence
  LDLR targeting guide sequence portion
gguggaugaggcagggccaggg

SEQ ID NO: 9626 - RNA, 22 nt, Artificial Sequence
  LDLR targeting guide sequence portion
gguggcaccgagaccaaacuca

SEQ ID NO: 9627 - RNA, 22 nt, Artificial Sequence
  LDLR targeting guide sequence portion
ggugggaggaugguuugagcuc

SEQ ID NO: 9628 - RNA, 22 nt, Artificial Sequence
  LDLR targeting guide sequence portion
ggugggcggacauaaagacgac

SEQ ID NO: 9629 - RNA, 22 nt, Artificial Sequence
  LDLR targeting guide sequence portion
ggugggucaugauucgggggug

SEQ ID NO: 9630 - RNA, 22 nt, Artificial Sequence
  LDLR targeting guide sequence portion
gguggguuuguaccuuccuuaa

SEQ ID NO: 9631 - RNA, 22 nt, Artificial Sequence
  LDLR targeting guide sequence portion
ggugucacuuuuuaaaccacug

SEQ ID NO: 9632 - RNA, 22 nt, Artificial Sequence
  LDLR targeting guide sequence portion
ggugucauccugguccccccgg

SEQ ID NO: 9633 - RNA, 22 nt, Artificial Sequence
  LDLR targeting guide sequence portion
gguguccugacagccacaccug

SEQ ID NO: 9634 - RNA, 22 nt, Artificial Sequence
  LDLR targeting guide sequence portion
ggugucucaggcacuuaauaaa

SEQ ID NO: 9635 - RNA, 22 nt, Artificial Sequence
  LDLR targeting guide sequence portion
gguguggcugucaggacaccag

SEQ ID NO: 9636 - RNA, 22 nt, Artificial Sequence
  LDLR targeting guide sequence portion
gguuaccuuggccgugaggaca

SEQ ID NO: 9637 - RNA, 22 nt, Artificial Sequence
  LDLR targeting guide sequence portion
gguuagccuuugcccugucacc

SEQ ID NO: 9638 - RNA, 22 nt, Artificial Sequence
  LDLR targeting guide sequence portion
gguuauugccucugaaaugccu

SEQ ID NO: 9639 - RNA, 22 nt, Artificial Sequence
  LDLR targeting guide sequence portion
gguucugggcagggacgggacu

SEQ ID NO: 9640 - RNA, 22 nt, Artificial Sequence
  LDLR targeting guide sequence portion
gguucuuucugaaaucgccgug

SEQ ID NO: 9641 - RNA, 22 nt, Artificial Sequence
  LDLR targeting guide sequence portion
gguugaccgggacuucaaagcc

SEQ ID NO: 9642 - RNA, 22 nt, Artificial Sequence
  LDLR targeting guide sequence portion
gguugcuguauuuguucaguga

SEQ ID NO: 9643 - RNA, 22 nt, Artificial Sequence
  LDLR targeting guide sequence portion
gguugggauuuugguuucuucc

SEQ ID NO: 9644 - RNA, 22 nt, Artificial Sequence
  LDLR targeting guide sequence portion
gguuuaaaaagugacacccauc

SEQ ID NO: 9645 - RNA, 22 nt, Artificial Sequence
  LDLR targeting guide sequence portion
gguuucggagcacguaaaugcg

SEQ ID NO: 9646 - RNA, 22 nt, Artificial Sequence
  LDLR targeting guide sequence portion
gguuucuuccuuuccucgugaa

SEQ ID NO: 9647 - RNA, 22 nt, Artificial Sequence
  LDLR targeting guide sequence portion
gguuugagcucaggcauuugag

SEQ ID NO: 9648 - RNA, 22 nt, Artificial Sequence
  LDLR targeting guide sequence portion
gguuuggcuuagagauuggugg

SEQ ID NO: 9649 - RNA, 22 nt, Artificial Sequence
  LDLR targeting guide sequence portion
gguuuguaccuuccuuaagcca

SEQ ID NO: 9650 - RNA, 22 nt, Artificial Sequence
  LDLR targeting guide sequence portion
gguuuuuguagagaugggaucu

SEQ ID NO: 9651 - RNA, 22 nt, Artificial Sequence
  LDLR targeting guide sequence portion
gguuuuuguagccugaaugucu

SEQ ID NO: 9652 - RNA, 22 nt, Artificial Sequence
  LDLR targeting guide sequence portion
guaaacacguugacuccugagu

SEQ ID NO: 9653 - RNA, 22 nt, Artificial Sequence
  LDLR targeting guide sequence portion
guaaaugcgucccuguacagau

SEQ ID NO: 9654 - RNA, 22 nt, Artificial Sequence
  LDLR targeting guide sequence portion
guaacacggcgauuucagaaag

SEQ ID NO: 9655 - RNA, 22 nt, Artificial Sequence
  LDLR targeting guide sequence portion
guaaccgggugucucaggcacu

SEQ ID NO: 9656 - RNA, 22 nt, Artificial Sequence
  LDLR targeting guide sequence portion
guaagacauucaggcuacaaaa

SEQ ID NO: 9657 - RNA, 22 nt, Artificial Sequence
  LDLR targeting guide sequence portion
guaagaccccaucucuuaaaaa

SEQ ID NO: 9658 - RNA, 22 nt, Artificial Sequence
  LDLR targeting guide sequence portion
guacaaacccaccucgaaagac

SEQ ID NO: 9659 - RNA, 22 nt, Artificial Sequence
  LDLR targeting guide sequence portion
guacaaagauuauuugcacgaa

SEQ ID NO: 9660 - RNA, 22 nt, Artificial Sequence
  LDLR targeting guide sequence portion
guacaacucugaacugagaaag

SEQ ID NO: 9661 - RNA, 22 nt, Artificial Sequence
  LDLR targeting guide sequence portion
guacacaguguacaacucugaa

SEQ ID NO: 9662 - RNA, 22 nt, Artificial Sequence
  LDLR targeting guide sequence portion
guacacuguguacauuuggcau

SEQ ID NO: 9663 - RNA, 22 nt, Artificial Sequence
  LDLR targeting guide sequence portion
guacagauaguggggauuuuuu

SEQ ID NO: 9664 - RNA, 22 nt, Artificial Sequence
  LDLR targeting guide sequence portion
guacagggacgcauuuacgugc

SEQ ID NO: 9665 - RNA, 22 nt, Artificial Sequence
  LDLR targeting guide sequence portion
guacauaaagaagaggcauuuc

SEQ ID NO: 9666 - RNA, 22 nt, Artificial Sequence
  LDLR targeting guide sequence portion
guacccagcugauuuuuaacuu

SEQ ID NO: 9667 - RNA, 22 nt, Artificial Sequence
  LDLR targeting guide sequence portion
guaccuuccuuaagccaggaaa

SEQ ID NO: 9668 - RNA, 22 nt, Artificial Sequence
  LDLR targeting guide sequence portion
guagagaugggaucucgcuuug

SEQ ID NO: 9669 - RNA, 22 nt, Artificial Sequence
  LDLR targeting guide sequence portion
guagccugaaugucuuacugug

SEQ ID NO: 9670 - RNA, 22 nt, Artificial Sequence
  LDLR targeting guide sequence portion
guaggggguuauugccucugaa

SEQ ID NO: 9671 - RNA, 22 nt, Artificial Sequence
  LDLR targeting guide sequence portion
guaggggucgggaggaugggca

SEQ ID NO: 9672 - RNA, 22 nt, Artificial Sequence
  LDLR targeting guide sequence portion
guauagaagguuuuuguagccu

SEQ ID NO: 9673 - RNA, 22 nt, Artificial Sequence
  LDLR targeting guide sequence portion
guaugaguggcuucugggagau

SEQ ID NO: 9674 - RNA, 22 nt, Artificial Sequence
  LDLR targeting guide sequence portion
guauguaugaguggcuucuggg

SEQ ID NO: 9675 - RNA, 22 nt, Artificial Sequence
  LDLR targeting guide sequence portion
guauguguuuaaaacaugcacg

SEQ ID NO: 9676 - RNA, 22 nt, Artificial Sequence
  LDLR targeting guide sequence portion
guauuucugaaauagggucuuc

SEQ ID NO: 9677 - RNA, 22 nt, Artificial Sequence
  LDLR targeting guide sequence portion
guauuuguucagugacuauucu

SEQ ID NO: 9678 - RNA, 22 nt, Artificial Sequence
  LDLR targeting guide sequence portion
gucaaacgauccagacuggagg

SEQ ID NO: 9679 - RNA, 22 nt, Artificial Sequence
  LDLR targeting guide sequence portion
gucaaccugccccucucugucc

SEQ ID NO: 9680 - RNA, 22 nt, Artificial Sequence
  LDLR targeting guide sequence portion
gucaacguguuuaccucuucua

SEQ ID NO: 9681 - RNA, 22 nt, Artificial Sequence
  LDLR targeting guide sequence portion
gucaaugaaugccggggacaga

SEQ ID NO: 9682 - RNA, 22 nt, Artificial Sequence
  LDLR targeting guide sequence portion
gucacaagggauuggcaauugu

SEQ ID NO: 9683 - RNA, 22 nt, Artificial Sequence
  LDLR targeting guide sequence portion
gucacccccgaaucaugaccca

SEQ ID NO: 9684 - RNA, 22 nt, Artificial Sequence
  LDLR targeting guide sequence portion
gucacccuuaauauuuauuaag

SEQ ID NO: 9685 - RNA, 22 nt, Artificial Sequence
  LDLR targeting guide sequence portion
gucacgguggagagaaacucaa

SEQ ID NO: 9686 - RNA, 22 nt, Artificial Sequence
  LDLR targeting guide sequence portion
gucacugaacaaauacagcaac

SEQ ID NO: 9687 - RNA, 22 nt, Artificial Sequence
  LDLR targeting guide sequence portion
gucacuggucacccuuaauauu

SEQ ID NO: 9688 - RNA, 22 nt, Artificial Sequence
  LDLR targeting guide sequence portion
gucacugucucuccggacauca

SEQ ID NO: 9689 - RNA, 22 nt, Artificial Sequence
  LDLR targeting guide sequence portion
gucacuuuuuaaaccacuguau

SEQ ID NO: 9690 - RNA, 22 nt, Artificial Sequence
  LDLR targeting guide sequence portion
gucagacucccgcgugaagaug

SEQ ID NO: 9691 - RNA, 22 nt, Artificial Sequence
  LDLR targeting guide sequence portion
gucaggacaccagccuggugcc

SEQ ID NO: 9692 - RNA, 22 nt, Artificial Sequence
  LDLR targeting guide sequence portion
gucaggcccagagaagcaagug

SEQ ID NO: 9693 - RNA, 22 nt, Artificial Sequence
  LDLR targeting guide sequence portion
gucagucuggaggaugacgugg

SEQ ID NO: 9694 - RNA, 22 nt, Artificial Sequence
  LDLR targeting guide sequence portion
gucauccuccagacugaccauc

SEQ ID NO: 9695 - RNA, 22 nt, Artificial Sequence
  LDLR targeting guide sequence portion
gucauccugguccccccgggcc

SEQ ID NO: 9696 - RNA, 22 nt, Artificial Sequence
  LDLR targeting guide sequence portion
gucaugauucgggggugacagg

SEQ ID NO: 9697 - RNA, 22 nt, Artificial Sequence
  LDLR targeting guide sequence portion
guccaguucgugcaaauaaucu

SEQ ID NO: 9698 - RNA, 22 nt, Artificial Sequence
  LDLR targeting guide sequence portion
guccccagggacaaaacacugu

SEQ ID NO: 9699 - RNA, 22 nt, Artificial Sequence
  LDLR targeting guide sequence portion
guccccccgggccuguuucucu

SEQ ID NO: 9700 - RNA, 22 nt, Artificial Sequence
  LDLR targeting guide sequence portion
guccccggcauucauugacacg

SEQ ID NO: 9701 - RNA, 22 nt, Artificial Sequence
  LDLR targeting guide sequence portion
guccccguuguauguaugagug

SEQ ID NO: 9702 - RNA, 22 nt, Artificial Sequence
  LDLR targeting guide sequence portion
gucccggucaaccugccccucu

SEQ ID NO: 9703 - RNA, 22 nt, Artificial Sequence
  LDLR targeting guide sequence portion
gucccgucaaacgauccagacu

SEQ ID NO: 9704 - RNA, 22 nt, Artificial Sequence
  LDLR targeting guide sequence portion
gucccgucccugcccagaaccc

SEQ ID NO: 9705 - RNA, 22 nt, Artificial Sequence
  LDLR targeting guide sequence portion
gucccguuggugccaucugcug

SEQ ID NO: 9706 - RNA, 22 nt, Artificial Sequence
  LDLR targeting guide sequence portion
gucccugcccagaacccuuccu

SEQ ID NO: 9707 - RNA, 22 nt, Artificial Sequence
  LDLR targeting guide sequence portion
gucccuggggacaauugccaau

SEQ ID NO: 9708 - RNA, 22 nt, Artificial Sequence
  LDLR targeting guide sequence portion
gucccuguacagauagugggga

SEQ ID NO: 9709 - RNA, 22 nt, Artificial Sequence
  LDLR targeting guide sequence portion
guccgaagccuguucugccucc

SEQ ID NO: 9710 - RNA, 22 nt, Artificial Sequence
  LDLR targeting guide sequence portion
guccgcccaccuagugcuucca

SEQ ID NO: 9711 - RNA, 22 nt, Artificial Sequence
  LDLR targeting guide sequence portion
guccggagagacagugacagcc

SEQ ID NO: 9712 - RNA, 22 nt, Artificial Sequence
  LDLR targeting guide sequence portion
guccucacggccaagguaaccg

SEQ ID NO: 9713 - RNA, 22 nt, Artificial Sequence
  LDLR targeting guide sequence portion
guccugacagccacaccugggu

SEQ ID NO: 9714 - RNA, 22 nt, Artificial Sequence
  LDLR targeting guide sequence portion
gucggaaaugaucuggcugaau

SEQ ID NO: 9715 - RNA, 22 nt, Artificial Sequence
  LDLR targeting guide sequence portion
gucgggaggaugggcaccaggc

SEQ ID NO: 9716 - RNA, 22 nt, Artificial Sequence
  LDLR targeting guide sequence portion
gucgucuuuauguccgcccacc

SEQ ID NO: 9717 - RNA, 22 nt, Artificial Sequence
  LDLR targeting guide sequence portion
gucgugagcuaugauuaugcca

SEQ ID NO: 9718 - RNA, 22 nt, Artificial Sequence
  LDLR targeting guide sequence portion
gucguguguguugggaugggau

SEQ ID NO: 9719 - RNA, 22 nt, Artificial Sequence
  LDLR targeting guide sequence portion
gucguugauggguauguguuua

SEQ ID NO: 9720 - RNA, 22 nt, Artificial Sequence
  LDLR targeting guide sequence portion
gucuagcaaggcuugcauagaa

SEQ ID NO: 9721 - RNA, 22 nt, Artificial Sequence
  LDLR targeting guide sequence portion
gucucaggaaggguucugggca

SEQ ID NO: 9722 - RNA, 22 nt, Artificial Sequence
  LDLR targeting guide sequence portion
gucucaggcacuuaauaaauau

SEQ ID NO: 9723 - RNA, 22 nt, Artificial Sequence
  LDLR targeting guide sequence portion
gucuccuugcacuuucucaguu

SEQ ID NO: 9724 - RNA, 22 nt, Artificial Sequence
  LDLR targeting guide sequence portion
gucucggugccaccacggauuc

SEQ ID NO: 9725 - RNA, 22 nt, Artificial Sequence
  LDLR targeting guide sequence portion
gucucuccggacaucagugcaa

SEQ ID NO: 9726 - RNA, 22 nt, Artificial Sequence
  LDLR targeting guide sequence portion
gucugacggaggcugucacugu

SEQ ID NO: 9727 - RNA, 22 nt, Artificial Sequence
  LDLR targeting guide sequence portion
gucuggaggaugacguggcgug

SEQ ID NO: 9728 - RNA, 22 nt, Artificial Sequence
  LDLR targeting guide sequence portion
gucuggaucguuugacgggacu

SEQ ID NO: 9729 - RNA, 22 nt, Artificial Sequence
  LDLR targeting guide sequence portion
gucuggccaaauucauuuuuua

SEQ ID NO: 9730 - RNA, 22 nt, Artificial Sequence
  LDLR targeting guide sequence portion
gucuucucugucuuugaauaaa

SEQ ID NO: 9731 - RNA, 22 nt, Artificial Sequence
  LDLR targeting guide sequence portion
gucuuuauguccgcccaccuag

SEQ ID NO: 9732 - RNA, 22 nt, Artificial Sequence
  LDLR targeting guide sequence portion
gucuuucgagguggguuuguac

SEQ ID NO: 9733 - RNA, 22 nt, Artificial Sequence
  LDLR targeting guide sequence portion
gucuuugaauaaaacaaggccg

SEQ ID NO: 9734 - RNA, 22 nt, Artificial Sequence
  LDLR targeting guide sequence portion
gugaacaucugccuggaguccc

SEQ ID NO: 9735 - RNA, 22 nt, Artificial Sequence
  LDLR targeting guide sequence portion
gugaagaugucacaagggauug

SEQ ID NO: 9736 - RNA, 22 nt, Artificial Sequence
  LDLR targeting guide sequence portion
gugaaggauaagagaaacaggc

SEQ ID NO: 9737 - RNA, 22 nt, Artificial Sequence
  LDLR targeting guide sequence portion
gugaauaucgagaacugccauu

SEQ ID NO: 9738 - RNA, 22 nt, Artificial Sequence
  LDLR targeting guide sequence portion
gugaaugaguuuggucucggug

SEQ ID NO: 9739 - RNA, 22 nt, Artificial Sequence
  LDLR targeting guide sequence portion
gugaauggcuuggaggcauuug

SEQ ID NO: 9740 - RNA, 22 nt, Artificial Sequence
  LDLR targeting guide sequence portion
gugacacaauccucaaacaugg

SEQ ID NO: 9741 - RNA, 22 nt, Artificial Sequence
  LDLR targeting guide sequence portion
gugacacccaucucccagaagc

SEQ ID NO: 9742 - RNA, 22 nt, Artificial Sequence
  LDLR targeting guide sequence portion
gugacagccuccgucagacucc

SEQ ID NO: 9743 - RNA, 22 nt, Artificial Sequence
  LDLR targeting guide sequence portion
gugacagggcaaaggcuaaccu

SEQ ID NO: 9744 - RNA, 22 nt, Artificial Sequence
  LDLR targeting guide sequence portion
gugacaucuucacgcgggaguc

SEQ ID NO: 9745 - RNA, 22 nt, Artificial Sequence
  LDLR targeting guide sequence portion
gugaccagugacucaggcucug

SEQ ID NO: 9746 - RNA, 22 nt, Artificial Sequence
  LDLR targeting guide sequence portion
gugacuauucucggggcccugu

SEQ ID NO: 9747 - RNA, 22 nt, Artificial Sequence
  LDLR targeting guide sequence portion
gugacucaggcucugccucugg

SEQ ID NO: 9748 - RNA, 22 nt, Artificial Sequence
  LDLR targeting guide sequence portion
gugagccacugcgcccggccuc

SEQ ID NO: 9749 - RNA, 22 nt, Artificial Sequence
  LDLR targeting guide sequence portion
gugagcuaugauuaugccacug

SEQ ID NO: 9750 - RNA, 22 nt, Artificial Sequence
  LDLR targeting guide sequence portion
gugaggacacguggccugcacc

SEQ ID NO: 9751 - RNA, 22 nt, Artificial Sequence
  LDLR targeting guide sequence portion
gugaggcaccugugucuggcca

SEQ ID NO: 9752 - RNA, 22 nt, Artificial Sequence
  LDLR targeting guide sequence portion
gugauaagccuuucugguuucg

SEQ ID NO: 9753 - RNA, 22 nt, Artificial Sequence
  LDLR targeting guide sequence portion
gugauccagcucagccucccaa

SEQ ID NO: 9754 - RNA, 22 nt, Artificial Sequence
  LDLR targeting guide sequence portion
gugaucgugaauaucgagaacu

SEQ ID NO: 9755 - RNA, 22 nt, Artificial Sequence
  LDLR targeting guide sequence portion
gugcaaacauaacaaaaaaucc

SEQ ID NO: 9756 - RNA, 22 nt, Artificial Sequence
  LDLR targeting guide sequence portion
gugcaacaguaacacggcgauu

SEQ ID NO: 9757 - RNA, 22 nt, Artificial Sequence
  LDLR targeting guide sequence portion
gugcaacgcuuuuugggagaau

SEQ ID NO: 9758 - RNA, 22 nt, Artificial Sequence
  LDLR targeting guide sequence portion
gugcaaggagaccacgggaaug

SEQ ID NO: 9759 - RNA, 22 nt, Artificial Sequence
  LDLR targeting guide sequence portion
gugcaggccacguguccucacg

SEQ ID NO: 9760 - RNA, 22 nt, Artificial Sequence
  LDLR targeting guide sequence portion
gugcagggaaccgugauaagcc

SEQ ID NO: 9761 - RNA, 22 nt, Artificial Sequence
  LDLR targeting guide sequence portion
gugcaucagcagcccauggccu

SEQ ID NO: 9762 - RNA, 22 nt, Artificial Sequence
  LDLR targeting guide sequence portion
gugcauguuuuaaacacauacc

SEQ ID NO: 9763 - RNA, 22 nt, Artificial Sequence
  LDLR targeting guide sequence portion
gugccaccacggauucagccag

SEQ ID NO: 9764 - RNA, 22 nt, Artificial Sequence
  LDLR targeting guide sequence portion
gugccaccguacccagcugauu

SEQ ID NO: 9765 - RNA, 22 nt, Artificial Sequence
  LDLR targeting guide sequence portion
gugccaucugcuguuguguguu

SEQ ID NO: 9766 - RNA, 22 nt, Artificial Sequence
  LDLR targeting guide sequence portion
gugcccauccucccgaccccua

SEQ ID NO: 9767 - RNA, 22 nt, Artificial Sequence
  LDLR targeting guide sequence portion
gugcccaugcaauggcuugggu

SEQ ID NO: 9768 - RNA, 22 nt, Artificial Sequence
  LDLR targeting guide sequence portion
gugccugagacacccgguuacc

SEQ ID NO: 9769 - RNA, 22 nt, Artificial Sequence
  LDLR targeting guide sequence portion
gugcuccgaaaccagaaaggcu

SEQ ID NO: 9770 - RNA, 22 nt, Artificial Sequence
  LDLR targeting guide sequence portion
gugcuuccacuucuaugcaaau

SEQ ID NO: 9771 - RNA, 22 nt, Artificial Sequence
  LDLR targeting guide sequence portion
guggaagcacuaggugggcgga

SEQ ID NO: 9772 - RNA, 22 nt, Artificial Sequence
  LDLR targeting guide sequence portion
guggagagaaacucaaaacuuc

SEQ ID NO: 9773 - RNA, 22 nt, Artificial Sequence
  LDLR targeting guide sequence portion
guggagguugcagugagccaug

SEQ ID NO: 9774 - RNA, 22 nt, Artificial Sequence
  LDLR targeting guide sequence portion
guggaugaggcagggccagggg

SEQ ID NO: 9775 - RNA, 22 nt, Artificial Sequence
  LDLR targeting guide sequence portion
guggcaccgagaccaaacucau

SEQ ID NO: 9776 - RNA, 22 nt, Artificial Sequence
  LDLR targeting guide sequence portion
guggcaucauuuggugaaugag

SEQ ID NO: 9777 - RNA, 22 nt, Artificial Sequence
  LDLR targeting guide sequence portion
guggccugcacccagguguggc

SEQ ID NO: 9778 - RNA, 22 nt, Artificial Sequence
  LDLR targeting guide sequence portion
guggcgugaacaucugccugga

SEQ ID NO: 9779 - RNA, 22 nt, Artificial Sequence
  LDLR targeting guide sequence portion
guggcugucaggacaccagccu

SEQ ID NO: 9780 - RNA, 22 nt, Artificial Sequence
  LDLR targeting guide sequence portion
guggcuucugggagaugggugu

SEQ ID NO: 9781 - RNA, 22 nt, Artificial Sequence
  LDLR targeting guide sequence portion
guggcuuucaacacacaacagc

SEQ ID NO: 9782 - RNA, 22 nt, Artificial Sequence
  LDLR targeting guide sequence portion
gugggaggaugguuugagcuca

SEQ ID NO: 9783 - RNA, 22 nt, Artificial Sequence
  LDLR targeting guide sequence portion
gugggcggacauaaagacgaca

SEQ ID NO: 9784 - RNA, 22 nt, Artificial Sequence
  LDLR targeting guide sequence portion
guggggauuuuuuguuauguuu

SEQ ID NO: 9785 - RNA, 22 nt, Artificial Sequence
  LDLR targeting guide sequence portion
guggguaggggucgggaggaug

SEQ ID NO: 9786 - RNA, 22 nt, Artificial Sequence
  LDLR targeting guide sequence portion
gugggucaugauucggggguga

SEQ ID NO: 9787 - RNA, 22 nt, Artificial Sequence
  LDLR targeting guide sequence portion
guggguuuguaccuuccuuaag

SEQ ID NO: 9788 - RNA, 22 nt, Artificial Sequence
  LDLR targeting guide sequence portion
guggucuccuugcacuuucuca

SEQ ID NO: 9789 - RNA, 22 nt, Artificial Sequence
  LDLR targeting guide sequence portion
gugguggcaccgagaccaaacu

SEQ ID NO: 9790 - RNA, 22 nt, Artificial Sequence
  LDLR targeting guide sequence portion
gugguuuaaaaagugacaccca

SEQ ID NO: 9791 - RNA, 22 nt, Artificial Sequence
  LDLR targeting guide sequence portion
guguacaacucugaacugagaa

SEQ ID NO: 9792 - RNA, 22 nt, Artificial Sequence
  LDLR targeting guide sequence portion
guguaggggguuauugccucug

SEQ ID NO: 9793 - RNA, 22 nt, Artificial Sequence
  LDLR targeting guide sequence portion
gugucaaugaaugccggggaca

SEQ ID NO: 9794 - RNA, 22 nt, Artificial Sequence
  LDLR targeting guide sequence portion
gugucacgguggagagaaacuc

SEQ ID NO: 9795 - RNA, 22 nt, Artificial Sequence
  LDLR targeting guide sequence portion
gugucacuuuuuaaaccacugu

SEQ ID NO: 9796 - RNA, 22 nt, Artificial Sequence
  LDLR targeting guide sequence portion
gugucauccugguccccccggg

SEQ ID NO: 9797 - RNA, 22 nt, Artificial Sequence
  LDLR targeting guide sequence portion
guguccucacggccaagguaac

SEQ ID NO: 9798 - RNA, 22 nt, Artificial Sequence
  LDLR targeting guide sequence portion
guguccugacagccacaccugg

SEQ ID NO: 9799 - RNA, 22 nt, Artificial Sequence
  LDLR targeting guide sequence portion
gugucucaggcacuuaauaaau

SEQ ID NO: 9800 - RNA, 22 nt, Artificial Sequence
  LDLR targeting guide sequence portion
gugucuggccaaauucauuuuu

SEQ ID NO: 9801 - RNA, 22 nt, Artificial Sequence
  LDLR targeting guide sequence portion
gugucuuucgagguggguuugu

SEQ ID NO: 9802 - RNA, 22 nt, Artificial Sequence
  LDLR targeting guide sequence portion
gugugcaacgcuuuuugggaga

SEQ ID NO: 9803 - RNA, 22 nt, Artificial Sequence
  LDLR targeting guide sequence portion
guguggcugucaggacaccagc

SEQ ID NO: 9804 - RNA, 22 nt, Artificial Sequence
  LDLR targeting guide sequence portion
guguguguugggaugggauccc

SEQ ID NO: 9805 - RNA, 22 nt, Artificial Sequence
  LDLR targeting guide sequence portion
guguguugaaagccacuugcuu

SEQ ID NO: 9806 - RNA, 22 nt, Artificial Sequence
  LDLR targeting guide sequence portion
guguguugggaugggaucccag

SEQ ID NO: 9807 - RNA, 22 nt, Artificial Sequence
  LDLR targeting guide sequence portion
guguuacuguugcacugauguc

SEQ ID NO: 9808 - RNA, 22 nt, Artificial Sequence
  LDLR targeting guide sequence portion
guguuauuauuuugcacuguuu

SEQ ID NO: 9809 - RNA, 22 nt, Artificial Sequence
  LDLR targeting guide sequence portion
guguugaaagccacuugcuucu

SEQ ID NO: 9810 - RNA, 22 nt, Artificial Sequence
  LDLR targeting guide sequence portion
guguugggaugggaucccaggc

SEQ ID NO: 9811 - RNA, 22 nt, Artificial Sequence
  LDLR targeting guide sequence portion
guguuuaaaacaugcacgguga

SEQ ID NO: 9812 - RNA, 22 nt, Artificial Sequence
  LDLR targeting guide sequence portion
guguuuaccucuucuaugcaag

SEQ ID NO: 9813 - RNA, 22 nt, Artificial Sequence
  LDLR targeting guide sequence portion
guguuuugucccuggggacaau

SEQ ID NO: 9814 - RNA, 22 nt, Artificial Sequence
  LDLR targeting guide sequence portion
guuaaaaaucagcuggguacgg

SEQ ID NO: 9815 - RNA, 22 nt, Artificial Sequence
  LDLR targeting guide sequence portion
guuaccuuggccgugaggacac

SEQ ID NO: 9816 - RNA, 22 nt, Artificial Sequence
  LDLR targeting guide sequence portion
guuacuguugcacugauguccg

SEQ ID NO: 9817 - RNA, 22 nt, Artificial Sequence
  LDLR targeting guide sequence portion
guuagccuuugcccugucaccc

SEQ ID NO: 9818 - RNA, 22 nt, Artificial Sequence
  LDLR targeting guide sequence portion
guuauguuugcacuuuguauau

SEQ ID NO: 9819 - RNA, 22 nt, Artificial Sequence
  LDLR targeting guide sequence portion
guuauuauuuugcacuguuuuc

SEQ ID NO: 9820 - RNA, 22 nt, Artificial Sequence
  LDLR targeting guide sequence portion
guuauugccucugaaaugccuc

SEQ ID NO: 9821 - RNA, 22 nt, Artificial Sequence
  LDLR targeting guide sequence portion
guucacgccacgucauccucca

SEQ ID NO: 9822 - RNA, 22 nt, Artificial Sequence
  LDLR targeting guide sequence portion
guucagaguuguacacugugua

SEQ ID NO: 9823 - RNA, 22 nt, Artificial Sequence
  LDLR targeting guide sequence portion
guucaggaguuggagaccaggc

SEQ ID NO: 9824 - RNA, 22 nt, Artificial Sequence
  LDLR targeting guide sequence portion
guucagugacuauucucggggc

SEQ ID NO: 9825 - RNA, 22 nt, Artificial Sequence
  LDLR targeting guide sequence portion
guucucgauauucacgaucacg

SEQ ID NO: 9826 - RNA, 22 nt, Artificial Sequence
  LDLR targeting guide sequence portion
guucugccucccagaugaauaa

SEQ ID NO: 9827 - RNA, 22 nt, Artificial Sequence
  LDLR targeting guide sequence portion
guucugggcagggacgggacuc

SEQ ID NO: 9828 - RNA, 22 nt, Artificial Sequence
  LDLR targeting guide sequence portion
guucuuucugaaaucgccgugu

SEQ ID NO: 9829 - RNA, 22 nt, Artificial Sequence
  LDLR targeting guide sequence portion
guugaaagccacuugcuucucu

SEQ ID NO: 9830 - RNA, 22 nt, Artificial Sequence
  LDLR targeting guide sequence portion
guugaccgggacuucaaagccg

SEQ ID NO: 9831 - RNA, 22 nt, Artificial Sequence
  LDLR targeting guide sequence portion
guugacuccugaguuuaggggu

SEQ ID NO: 9832 - RNA, 22 nt, Artificial Sequence
  LDLR targeting guide sequence portion
guugauggguauguguuuaaaa

SEQ ID NO: 9833 - RNA, 22 nt, Artificial Sequence
  LDLR targeting guide sequence portion
guugcacacaguccaguucgug

SEQ ID NO: 9834 - RNA, 22 nt, Artificial Sequence
  LDLR targeting guide sequence portion
guugcacugauguccggagaga

SEQ ID NO: 9835 - RNA, 22 nt, Artificial Sequence
  LDLR targeting guide sequence portion
guugcccaggcuggaaagcagu

SEQ ID NO: 9836 - RNA, 22 nt, Artificial Sequence
  LDLR targeting guide sequence portion
guugcucaggccuggucuccaa

SEQ ID NO: 9837 - RNA, 22 nt, Artificial Sequence
  LDLR targeting guide sequence portion
guugcuguauuuguucagugac

SEQ ID NO: 9838 - RNA, 22 nt, Artificial Sequence
  LDLR targeting guide sequence portion
guuggagaccaggccugagcaa

SEQ ID NO: 9839 - RNA, 22 nt, Artificial Sequence
  LDLR targeting guide sequence portion
guugggaugggaucccaggcca

SEQ ID NO: 9840 - RNA, 22 nt, Artificial Sequence
  LDLR targeting guide sequence portion
guugggauuuugguuucuuccu

SEQ ID NO: 9841 - RNA, 22 nt, Artificial Sequence
  LDLR targeting guide sequence portion
guuggugccaucugcuguugug

SEQ ID NO: 9842 - RNA, 22 nt, Artificial Sequence
  LDLR targeting guide sequence portion
guuguacacuguguacauuugg

SEQ ID NO: 9843 - RNA, 22 nt, Artificial Sequence
  LDLR targeting guide sequence portion
guuguauguaugaguggcuucu

SEQ ID NO: 9844 - RNA, 22 nt, Artificial Sequence
  LDLR targeting guide sequence portion
guuguauuucugaaauaggguc

SEQ ID NO: 9845 - RNA, 22 nt, Artificial Sequence
  LDLR targeting guide sequence portion
guuguguguugaaagccacuug

SEQ ID NO: 9846 - RNA, 22 nt, Artificial Sequence
  LDLR targeting guide sequence portion
guuuaaaaagugacacccaucu

SEQ ID NO: 9847 - RNA, 22 nt, Artificial Sequence
  LDLR targeting guide sequence portion
guuuaaaacaugcacggugagg

SEQ ID NO: 9848 - RNA, 22 nt, Artificial Sequence
  LDLR targeting guide sequence portion
guuuaccucuucuaugcaagcc

SEQ ID NO: 9849 - RNA, 22 nt, Artificial Sequence
  LDLR targeting guide sequence portion
guuuagggguuuggcuuagaga

SEQ ID NO: 9850 - RNA, 22 nt, Artificial Sequence
  LDLR targeting guide sequence portion
guuucaaccaauauacaaagug

SEQ ID NO: 9851 - RNA, 22 nt, Artificial Sequence
  LDLR targeting guide sequence portion
guuucggagcacguaaaugcgu

SEQ ID NO: 9852 - RNA, 22 nt, Artificial Sequence
  LDLR targeting guide sequence portion
guuucucuccaccgugacacaa

SEQ ID NO: 9853 - RNA, 22 nt, Artificial Sequence
  LDLR targeting guide sequence portion
guuucucuuauccuucacgagg

SEQ ID NO: 9854 - RNA, 22 nt, Artificial Sequence
  LDLR targeting guide sequence portion
guuucuuccuuuccucgugaag

SEQ ID NO: 9855 - RNA, 22 nt, Artificial Sequence
  LDLR targeting guide sequence portion
guuugacgggacuucagguucu

SEQ ID NO: 9856 - RNA, 22 nt, Artificial Sequence
  LDLR targeting guide sequence portion
guuugagcucaggcauuugagg

SEQ ID NO: 9857 - RNA, 22 nt, Artificial Sequence
  LDLR targeting guide sequence portion
guuugaggauugugucacggug

SEQ ID NO: 9858 - RNA, 22 nt, Artificial Sequence
  LDLR targeting guide sequence portion
guuugcacuuuguauauugguu

SEQ ID NO: 9859 - RNA, 22 nt, Artificial Sequence
  LDLR targeting guide sequence portion
guuuggcuuagagauuggugga

SEQ ID NO: 9860 - RNA, 22 nt, Artificial Sequence
  LDLR targeting guide sequence portion
guuuggucucggugccaccacg

SEQ ID NO: 9861 - RNA, 22 nt, Artificial Sequence
  LDLR targeting guide sequence portion
guuuguaccuuccuuaagccag

SEQ ID NO: 9862 - RNA, 22 nt, Artificial Sequence
  LDLR targeting guide sequence portion
guuuuaaacacauacccaucaa

SEQ ID NO: 9863 - RNA, 22 nt, Artificial Sequence
  LDLR targeting guide sequence portion
guuuuauauauuuauucaucug

SEQ ID NO: 9864 - RNA, 22 nt, Artificial Sequence
  LDLR targeting guide sequence portion
guuuuauucaaagacagagaag

SEQ ID NO: 9865 - RNA, 22 nt, Artificial Sequence
  LDLR targeting guide sequence portion
guuuucugucguguguguuggg

SEQ ID NO: 9866 - RNA, 22 nt, Artificial Sequence
  LDLR targeting guide sequence portion
guuuugaguuucucuccaccgu

SEQ ID NO: 9867 - RNA, 22 nt, Artificial Sequence
  LDLR targeting guide sequence portion
guuuugucccuggggacaauug

SEQ ID NO: 9868 - RNA, 22 nt, Artificial Sequence
  LDLR targeting guide sequence portion
guuuuuguagagaugggaucuc

SEQ ID NO: 9869 - RNA, 22 nt, Artificial Sequence
  LDLR targeting guide sequence portion
guuuuuguagccugaaugucuu

SEQ ID NO: 9870 - RNA, 22 nt, Artificial Sequence
  LDLR targeting guide sequence portion
uaaaaaaugaauuuggccagac

SEQ ID NO: 9871 - RNA, 22 nt, Artificial Sequence
  LDLR targeting guide sequence portion
uaaaaagugacacccaucuccc

SEQ ID NO: 9872 - RNA, 22 nt, Artificial Sequence
  LDLR targeting guide sequence portion
uaaaaaucagcuggguacggug

SEQ ID NO: 9873 - RNA, 22 nt, Artificial Sequence
  LDLR targeting guide sequence portion
uaaaacaaagcucuggcaggca

SEQ ID NO: 9874 - RNA, 22 nt, Artificial Sequence
  LDLR targeting guide sequence portion
uaaaacaaggccggcgaggucu

SEQ ID NO: 9875 - RNA, 22 nt, Artificial Sequence
  LDLR targeting guide sequence portion
uaaaacaugcacggugaggccg

SEQ ID NO: 9876 - RNA, 22 nt, Artificial Sequence
  LDLR targeting guide sequence portion
uaaacacauacccaucaacgac

SEQ ID NO: 9877 - RNA, 22 nt, Artificial Sequence
  LDLR targeting guide sequence portion
uaaacacguugacuccugaguu

SEQ ID NO: 9878 - RNA, 22 nt, Artificial Sequence
  LDLR targeting guide sequence portion
uaaaccacuguauagaagguuu

SEQ ID NO: 9879 - RNA, 22 nt, Artificial Sequence
  LDLR targeting guide sequence portion
uaaacucaggagucaacguguu

SEQ ID NO: 9880 - RNA, 22 nt, Artificial Sequence
  LDLR targeting guide sequence portion
uaaagaagaggcauuucagagg

SEQ ID NO: 9881 - RNA, 22 nt, Artificial Sequence
  LDLR targeting guide sequence portion
uaaagacgacaauggcaguucu

SEQ ID NO: 9882 - RNA, 22 nt, Artificial Sequence
  LDLR targeting guide sequence portion
uaaauaaauccuccagucugga

SEQ ID NO: 9883 - RNA, 22 nt, Artificial Sequence
  LDLR targeting guide sequence portion
uaaauauauaaaacaaagcucu

SEQ ID NO: 9884 - RNA, 22 nt, Artificial Sequence
  LDLR targeting guide sequence portion
uaaauauuaagggugaccagug

SEQ ID NO: 9885 - RNA, 22 nt, Artificial Sequence
  LDLR targeting guide sequence portion
uaaauccuccagucuggaucgu

SEQ ID NO: 9886 - RNA, 22 nt, Artificial Sequence
  LDLR targeting guide sequence portion
uaaaugcgucccuguacagaua

SEQ ID NO: 9887 - RNA, 22 nt, Artificial Sequence
  LDLR targeting guide sequence portion
uaacaaaaaauccccacuaucu

SEQ ID NO: 9888 - RNA, 22 nt, Artificial Sequence
  LDLR targeting guide sequence portion
uaacacaaaugccaaauguaca

SEQ ID NO: 9889 - RNA, 22 nt, Artificial Sequence
  LDLR targeting guide sequence portion
uaacacggcgauuucagaaaga

SEQ ID NO: 9890 - RNA, 22 nt, Artificial Sequence
  LDLR targeting guide sequence portion
uaacaguuucaaccaauauaca

SEQ ID NO: 9891 - RNA, 22 nt, Artificial Sequence
  LDLR targeting guide sequence portion
uaacccccuacacagggccccg

SEQ ID NO: 9892 - RNA, 22 nt, Artificial Sequence
  LDLR targeting guide sequence portion
uaaccgggugucucaggcacuu

SEQ ID NO: 9893 - RNA, 22 nt, Artificial Sequence
  LDLR targeting guide sequence portion
uaaccuggcugucuagcaaggc

SEQ ID NO: 9894 - RNA, 22 nt, Artificial Sequence
  LDLR targeting guide sequence portion
uaacuuuuugguuuuuguagag

SEQ ID NO: 9895 - RNA, 22 nt, Artificial Sequence
  LDLR targeting guide sequence portion
uaagacauucaggcuacaaaaa

SEQ ID NO: 9896 - RNA, 22 nt, Artificial Sequence
  LDLR targeting guide sequence portion
uaagagaaacaggcccgggggg

SEQ ID NO: 9897 - RNA, 22 nt, Artificial Sequence
  LDLR targeting guide sequence portion
uaagccaaaccccuaaacucag

SEQ ID NO: 9898 - RNA, 22 nt, Artificial Sequence
  LDLR targeting guide sequence portion
uaagccaggaaagggauucaug

SEQ ID NO: 9899 - RNA, 22 nt, Artificial Sequence
  LDLR targeting guide sequence portion
uaagccuuucugguuucggagc

SEQ ID NO: 9900 - RNA, 22 nt, Artificial Sequence
  LDLR targeting guide sequence portion
uaaggaagguacaaacccaccu

SEQ ID NO: 9901 - RNA, 22 nt, Artificial Sequence
  LDLR targeting guide sequence portion
uaagggugaccagugacucagg

SEQ ID NO: 9902 - RNA, 22 nt, Artificial Sequence
  LDLR targeting guide sequence portion
uaagugccugagacacccgguu

SEQ ID NO: 9903 - RNA, 22 nt, Artificial Sequence
  LDLR targeting guide sequence portion
uaauaaauauuaagggugacca

SEQ ID NO: 9904 - RNA, 22 nt, Artificial Sequence
  LDLR targeting guide sequence portion
uaauaacacaaaugccaaaugu

SEQ ID NO: 9905 - RNA, 22 nt, Artificial Sequence
  LDLR targeting guide sequence portion
uaauauuuauuaagugccugag

SEQ ID NO: 9906 - RNA, 22 nt, Artificial Sequence
  LDLR targeting guide sequence portion
uaaucauagcucacgacagccu

SEQ ID NO: 9907 - RNA, 22 nt, Artificial Sequence
  LDLR targeting guide sequence portion
uaauugaucacaguaagacauu

SEQ ID NO: 9908 - RNA, 22 nt, Artificial Sequence
  LDLR targeting guide sequence portion
uacaaacccaccucgaaagaca

SEQ ID NO: 9909 - RNA, 22 nt, Artificial Sequence
  LDLR targeting guide sequence portion
uacaaagauuauuugcacgaac

SEQ ID NO: 9910 - RNA, 22 nt, Artificial Sequence
  LDLR targeting guide sequence portion
uacaacggggacaucauucucc

SEQ ID NO: 9911 - RNA, 22 nt, Artificial Sequence
  LDLR targeting guide sequence portion
uacaacucugaacugagaaagu

SEQ ID NO: 9912 - RNA, 22 nt, Artificial Sequence
  LDLR targeting guide sequence portion
uacacagggccccgagaauagu

SEQ ID NO: 9913 - RNA, 22 nt, Artificial Sequence
  LDLR targeting guide sequence portion
uacacaguguacaacucugaac

SEQ ID NO: 9914 - RNA, 22 nt, Artificial Sequence
  LDLR targeting guide sequence portion
uacacuguguacauuuggcauu

SEQ ID NO: 9915 - RNA, 22 nt, Artificial Sequence
  LDLR targeting guide sequence portion
uacagauaguggggauuuuuug

SEQ ID NO: 9916 - RNA, 22 nt, Artificial Sequence
  LDLR targeting guide sequence portion
uacagcaaccaggguuugcaaa

SEQ ID NO: 9917 - RNA, 22 nt, Artificial Sequence
  LDLR targeting guide sequence portion
uacaggcgugaggcaccugugu

SEQ ID NO: 9918 - RNA, 22 nt, Artificial Sequence
  LDLR targeting guide sequence portion
uacagggacgcauuuacgugcu

SEQ ID NO: 9919 - RNA, 22 nt, Artificial Sequence
  LDLR targeting guide sequence portion
uacagugguuuaaaaagugaca

SEQ ID NO: 9920 - RNA, 22 nt, Artificial Sequence
  LDLR targeting guide sequence portion
uacauacaacggggacaucauu

SEQ ID NO: 9921 - RNA, 22 nt, Artificial Sequence
  LDLR targeting guide sequence portion
uacccacuuccauucccguggu

SEQ ID NO: 9922 - RNA, 22 nt, Artificial Sequence
  LDLR targeting guide sequence portion
uacccagcugauuuuuaacuuu

SEQ ID NO: 9923 - RNA, 22 nt, Artificial Sequence
  LDLR targeting guide sequence portion
uacccaucaacgacaagauugg

SEQ ID NO: 9924 - RNA, 22 nt, Artificial Sequence
  LDLR targeting guide sequence portion
uaccucuucuaugcaagccuug

SEQ ID NO: 9925 - RNA, 22 nt, Artificial Sequence
  LDLR targeting guide sequence portion
uaccuuccuuaagccaggaaag

SEQ ID NO: 9926 - RNA, 22 nt, Artificial Sequence
  LDLR targeting guide sequence portion
uaccuuggccgugaggacacgu

SEQ ID NO: 9927 - RNA, 22 nt, Artificial Sequence
  LDLR targeting guide sequence portion
uacgugcuccgaaaccagaaag

SEQ ID NO: 9928 - RNA, 22 nt, Artificial Sequence
  LDLR targeting guide sequence portion
uacuauguugcccaggcuggaa

SEQ ID NO: 9929 - RNA, 22 nt, Artificial Sequence
  LDLR targeting guide sequence portion
uacuguugcacugauguccgga

SEQ ID NO: 9930 - RNA, 22 nt, Artificial Sequence
  LDLR targeting guide sequence portion
uagaagagguaaacacguugac

SEQ ID NO: 9931 - RNA, 22 nt, Artificial Sequence
  LDLR targeting guide sequence portion
uagaagguuuuuguagccugaa

SEQ ID NO: 9932 - RNA, 22 nt, Artificial Sequence
  LDLR targeting guide sequence portion
uagaaguggaagcacuaggugg

SEQ ID NO: 9933 - RNA, 22 nt, Artificial Sequence
  LDLR targeting guide sequence portion
uagacagccagguuagccuuug

SEQ ID NO: 9934 - RNA, 22 nt, Artificial Sequence
  LDLR targeting guide sequence portion
uagagauugguggaugaggcag

SEQ ID NO: 9935 - RNA, 22 nt, Artificial Sequence
  LDLR targeting guide sequence portion
uagcaaggcuugcauagaagag

SEQ ID NO: 9936 - RNA, 22 nt, Artificial Sequence
  LDLR targeting guide sequence portion
uagccugaaugucuuacuguga

SEQ ID NO: 9937 - RNA, 22 nt, Artificial Sequence
  LDLR targeting guide sequence portion
uagccuuugcccugucaccccc

SEQ ID NO: 9938 - RNA, 22 nt, Artificial Sequence
  LDLR targeting guide sequence portion
uagcucacgacagccucaaaug

SEQ ID NO: 9939 - RNA, 22 nt, Artificial Sequence
  LDLR targeting guide sequence portion
uaggggguuauugccucugaaa

SEQ ID NO: 9940 - RNA, 22 nt, Artificial Sequence
  LDLR targeting guide sequence portion
uaggggucgggaggaugggcac

SEQ ID NO: 9941 - RNA, 22 nt, Artificial Sequence
  LDLR targeting guide sequence portion
uagggguuuggcuuagagauug

SEQ ID NO: 9942 - RNA, 22 nt, Artificial Sequence
  LDLR targeting guide sequence portion
uaggugggcggacauaaagacg

SEQ ID NO: 9943 - RNA, 22 nt, Artificial Sequence
  LDLR targeting guide sequence portion
uaguaagaccccaucucuuaaa

SEQ ID NO: 9944 - RNA, 22 nt, Artificial Sequence
  LDLR targeting guide sequence portion
uagucacugaacaaauacagca

SEQ ID NO: 9945 - RNA, 22 nt, Artificial Sequence
  LDLR targeting guide sequence portion
uagugcuuccacuucuaugcaa

SEQ ID NO: 9946 - RNA, 22 nt, Artificial Sequence
  LDLR targeting guide sequence portion
uaguggggauuuuuuguuaugu

SEQ ID NO: 9947 - RNA, 22 nt, Artificial Sequence
  LDLR targeting guide sequence portion
uaguuguauuucugaaauaggg

SEQ ID NO: 9948 - RNA, 22 nt, Artificial Sequence
  LDLR targeting guide sequence portion
uauaaaacaaagcucuggcagg

SEQ ID NO: 9949 - RNA, 22 nt, Artificial Sequence
  LDLR targeting guide sequence portion
uauacagugguuuaaaaaguga

SEQ ID NO: 9950 - RNA, 22 nt, Artificial Sequence
  LDLR targeting guide sequence portion
uauagaagguuuuuguagccug

SEQ ID NO: 9951 - RNA, 22 nt, Artificial Sequence
  LDLR targeting guide sequence portion
uauauaaaacaaagcucuggca

SEQ ID NO: 9952 - RNA, 22 nt, Artificial Sequence
  LDLR targeting guide sequence portion
uauauauuuauucaucugggag

SEQ ID NO: 9953 - RNA, 22 nt, Artificial Sequence
  LDLR targeting guide sequence portion
uauauuuauucaucugggaggc

SEQ ID NO: 9954 - RNA, 22 nt, Artificial Sequence
  LDLR targeting guide sequence portion
uauccuucacgaggaaaggaag

SEQ ID NO: 9955 - RNA, 22 nt, Artificial Sequence
  LDLR targeting guide sequence portion
uaucgagaacugccauugucgu

SEQ ID NO: 9956 - RNA, 22 nt, Artificial Sequence
  LDLR targeting guide sequence portion
uaucuguacagggacgcauuua

SEQ ID NO: 9957 - RNA, 22 nt, Artificial Sequence
  LDLR targeting guide sequence portion
uaugaguggcuucugggagaug

SEQ ID NO: 9958 - RNA, 22 nt, Artificial Sequence
  LDLR targeting guide sequence portion
uaugauuaugccacugcuuucc

SEQ ID NO: 9959 - RNA, 22 nt, Artificial Sequence
  LDLR targeting guide sequence portion
uaugcaaaugccuccaagccau

SEQ ID NO: 9960 - RNA, 22 nt, Artificial Sequence
  LDLR targeting guide sequence portion
uaugcaagccuugcuagacagc

SEQ ID NO: 9961 - RNA, 22 nt, Artificial Sequence
  LDLR targeting guide sequence portion
uaugccacugcuuuccagccug

SEQ ID NO: 9962 - RNA, 22 nt, Artificial Sequence
  LDLR targeting guide sequence portion
uauguacaaagauuauuugcac

SEQ ID NO: 9963 - RNA, 22 nt, Artificial Sequence
  LDLR targeting guide sequence portion
uauguaugaguggcuucuggga

SEQ ID NO: 9964 - RNA, 22 nt, Artificial Sequence
  LDLR targeting guide sequence portion
uauguccgcccaccuagugcuu

SEQ ID NO: 9965 - RNA, 22 nt, Artificial Sequence
  LDLR targeting guide sequence portion
uauguguuuaaaacaugcacgg

SEQ ID NO: 9966 - RNA, 22 nt, Artificial Sequence
  LDLR targeting guide sequence portion
uauuaagggugaccagugacuc

SEQ ID NO: 9967 - RNA, 22 nt, Artificial Sequence
  LDLR targeting guide sequence portion
uauuaagugccugagacacccg

SEQ ID NO: 9968 - RNA, 22 nt, Artificial Sequence
  LDLR targeting guide sequence portion
uauuauuuugcacuguuuucug

SEQ ID NO: 9969 - RNA, 22 nt, Artificial Sequence
  LDLR targeting guide sequence portion
uauucaaagacagagaagacca

SEQ ID NO: 9970 - RNA, 22 nt, Artificial Sequence
  LDLR targeting guide sequence portion
uauucacgaucacggcuuugaa

SEQ ID NO: 9971 - RNA, 22 nt, Artificial Sequence
  LDLR targeting guide sequence portion
uauucaucugggaggcagaaca

SEQ ID NO: 9972 - RNA, 22 nt, Artificial Sequence
  LDLR targeting guide sequence portion
uauucucggggcccuguguagg

SEQ ID NO: 9973 - RNA, 22 nt, Artificial Sequence
  LDLR targeting guide sequence portion
uauugccucugaaaugccucuu

SEQ ID NO: 9974 - RNA, 22 nt, Artificial Sequence
  LDLR targeting guide sequence portion
uauuuauuaagugccugagaca

SEQ ID NO: 9975 - RNA, 22 nt, Artificial Sequence
  LDLR targeting guide sequence portion
uauuuauucaucugggaggcag

SEQ ID NO: 9976 - RNA, 22 nt, Artificial Sequence
  LDLR targeting guide sequence portion
uauuuauuuuugcaaacccugg

SEQ ID NO: 9977 - RNA, 22 nt, Artificial Sequence
  LDLR targeting guide sequence portion
uauuucugaaauagggucuuca

SEQ ID NO: 9978 - RNA, 22 nt, Artificial Sequence
  LDLR targeting guide sequence portion
uauuugcacgaacuggacugug

SEQ ID NO: 9979 - RNA, 22 nt, Artificial Sequence
  LDLR targeting guide sequence portion
uauuuguucagugacuauucuc

SEQ ID NO: 9980 - RNA, 22 nt, Artificial Sequence
  LDLR targeting guide sequence portion
uauuuugcacuguuuucugucg

SEQ ID NO: 9981 - RNA, 22 nt, Artificial Sequence
  LDLR targeting guide sequence portion
uauuuuugcaaacccugguugc

SEQ ID NO: 9982 - RNA, 22 nt, Artificial Sequence
  LDLR targeting guide sequence portion
ucaaaacuuccuggagagaaau

SEQ ID NO: 9983 - RNA, 22 nt, Artificial Sequence
  LDLR targeting guide sequence portion
ucaaacauggaagaugaaaggg

SEQ ID NO: 9984 - RNA, 22 nt, Artificial Sequence
  LDLR targeting guide sequence portion
ucaaacgauccagacuggagga

SEQ ID NO: 9985 - RNA, 22 nt, Artificial Sequence
  LDLR targeting guide sequence portion
ucaaagacagagaagaccaaag

SEQ ID NO: 9986 - RNA, 22 nt, Artificial Sequence
  LDLR targeting guide sequence portion
ucaaagccgugaucgugaauau

SEQ ID NO: 9987 - RNA, 22 nt, Artificial Sequence
  LDLR targeting guide sequence portion
ucaaaugccugagcucaaacca

SEQ ID NO: 9988 - RNA, 22 nt, Artificial Sequence
  LDLR targeting guide sequence portion
ucaacacacaacagcagauggc

SEQ ID NO: 9989 - RNA, 22 nt, Artificial Sequence
  LDLR targeting guide sequence portion
ucaaccugccccucucuguccc

SEQ ID NO: 9990 - RNA, 22 nt, Artificial Sequence
  LDLR targeting guide sequence portion
ucaacgacaagauuggggaagu

SEQ ID NO: 9991 - RNA, 22 nt, Artificial Sequence
  LDLR targeting guide sequence portion
ucaacguguuuaccucuucuau

SEQ ID NO: 9992 - RNA, 22 nt, Artificial Sequence
  LDLR targeting guide sequence portion
ucaagugauccagcucagccuc

SEQ ID NO: 9993 - RNA, 22 nt, Artificial Sequence
  LDLR targeting guide sequence portion
ucaaugaaugccggggacagag

SEQ ID NO: 9994 - RNA, 22 nt, Artificial Sequence
  LDLR targeting guide sequence portion
ucacaagggauuggcaauuguc

SEQ ID NO: 9995 - RNA, 22 nt, Artificial Sequence
  LDLR targeting guide sequence portion
ucacaggcacgugccaccguac

SEQ ID NO: 9996 - RNA, 22 nt, Artificial Sequence
  LDLR targeting guide sequence portion
ucacaguaagacauucaggcua

SEQ ID NO: 9997 - RNA, 22 nt, Artificial Sequence
  LDLR targeting guide sequence portion
ucaccaaaugaugccacuuccc

SEQ ID NO: 9998 - RNA, 22 nt, Artificial Sequence
  LDLR targeting guide sequence portion
ucacccccgaaucaugacccac

SEQ ID NO: 9999 - RNA, 22 nt, Artificial Sequence
  LDLR targeting guide sequence portion
ucacccuuaauauuuauuaagu

SEQ ID NO: 10000 - RNA, 22 nt, Artificial Sequence
  LDLR targeting guide sequence portion
ucaccgugcauguuuuaaacac

SEQ ID NO: 10001 - RNA, 22 nt, Artificial Sequence
  LDLR targeting guide sequence portion
ucacgacagccucaaaugccug

SEQ ID NO: 10002 - RNA, 22 nt, Artificial Sequence
  LDLR targeting guide sequence portion
ucacgaggaaaggaagaaacca

SEQ ID NO: 10003 - RNA, 22 nt, Artificial Sequence
  LDLR targeting guide sequence portion
ucacgaucacggcuuugaaguc

SEQ ID NO: 10004 - RNA, 22 nt, Artificial Sequence
  LDLR targeting guide sequence portion
ucacgccacgucauccuccaga

SEQ ID NO: 10005 - RNA, 22 nt, Artificial Sequence
  LDLR targeting guide sequence portion
ucacgcgggagucugacggagg

SEQ ID NO: 10006 - RNA, 22 nt, Artificial Sequence
  LDLR targeting guide sequence portion
ucacggccaagguaaccgggug

SEQ ID NO: 10007 - RNA, 22 nt, Artificial Sequence
  LDLR targeting guide sequence portion
ucacggcuuugaagucccgguc

SEQ ID NO: 10008 - RNA, 22 nt, Artificial Sequence
  LDLR targeting guide sequence portion
ucacugaacaaauacagcaacc

SEQ ID NO: 10009 - RNA, 22 nt, Artificial Sequence
  LDLR targeting guide sequence portion
ucacuggucacccuuaauauuu

SEQ ID NO: 10010 - RNA, 22 nt, Artificial Sequence
  LDLR targeting guide sequence portion
ucacugucucuccggacaucag

SEQ ID NO: 10011 - RNA, 22 nt, Artificial Sequence
  LDLR targeting guide sequence portion
ucacuuccccaaucuugucguu

SEQ ID NO: 10012 - RNA, 22 nt, Artificial Sequence
  LDLR targeting guide sequence portion
ucacuuuuuaaaccacuguaua

SEQ ID NO: 10013 - RNA, 22 nt, Artificial Sequence
  LDLR targeting guide sequence portion
ucagaaagaaccugaagucccg

SEQ ID NO: 10014 - RNA, 22 nt, Artificial Sequence
  LDLR targeting guide sequence portion
ucagacucccgcgugaagaugu

SEQ ID NO: 10015 - RNA, 22 nt, Artificial Sequence
  LDLR targeting guide sequence portion
ucagaggcaauaacccccuaca

SEQ ID NO: 10016 - RNA, 22 nt, Artificial Sequence
  LDLR targeting guide sequence portion
ucagaguuguacacuguguaca

SEQ ID NO: 10017 - RNA, 22 nt, Artificial Sequence
  LDLR targeting guide sequence portion
ucagcagcccauggccucuggc

SEQ ID NO: 10018 - RNA, 22 nt, Artificial Sequence
  LDLR targeting guide sequence portion
ucagccagaucauuuccgacgc

SEQ ID NO: 10019 - RNA, 22 nt, Artificial Sequence
  LDLR targeting guide sequence portion
ucagccucgccaugccuggcca

SEQ ID NO: 10020 - RNA, 22 nt, Artificial Sequence
  LDLR targeting guide sequence portion
ucagcuggguacgguggcacgu

SEQ ID NO: 10021 - RNA, 22 nt, Artificial Sequence
  LDLR targeting guide sequence portion
ucaggacaccagccuggugccc

SEQ ID NO: 10022 - RNA, 22 nt, Artificial Sequence
  LDLR targeting guide sequence portion
ucaggagucaacguguuuaccu

SEQ ID NO: 10023 - RNA, 22 nt, Artificial Sequence
  LDLR targeting guide sequence portion
ucaggaguuggagaccaggccu

SEQ ID NO: 10024 - RNA, 22 nt, Artificial Sequence
  LDLR targeting guide sequence portion
ucaggcacuuaauaaauauuaa

SEQ ID NO: 10025 - RNA, 22 nt, Artificial Sequence
  LDLR targeting guide sequence portion
ucaggcauuugaggcugucgug

SEQ ID NO: 10026 - RNA, 22 nt, Artificial Sequence
  LDLR targeting guide sequence portion
ucaggcccagagaagcaagugg

SEQ ID NO: 10027 - RNA, 22 nt, Artificial Sequence
  LDLR targeting guide sequence portion
ucaggccuggucuccaacuccu

SEQ ID NO: 10028 - RNA, 22 nt, Artificial Sequence
  LDLR targeting guide sequence portion
ucaggcuacaaaaaccuucuau

SEQ ID NO: 10029 - RNA, 22 nt, Artificial Sequence
  LDLR targeting guide sequence portion
ucaggcucugccucugggaagu

SEQ ID NO: 10030 - RNA, 22 nt, Artificial Sequence
  LDLR targeting guide sequence portion
ucagguucuuucugaaaucgcc

SEQ ID NO: 10031 - RNA, 22 nt, Artificial Sequence
  LDLR targeting guide sequence portion
ucagucuggaggaugacguggc

SEQ ID NO: 10032 - RNA, 22 nt, Artificial Sequence
  LDLR targeting guide sequence portion
ucagugacuauucucggggccc

SEQ ID NO: 10033 - RNA, 22 nt, Artificial Sequence
  LDLR targeting guide sequence portion
ucagugcaacaguaacacggcg

SEQ ID NO: 10034 - RNA, 22 nt, Artificial Sequence
  LDLR targeting guide sequence portion
ucaguucagaguuguacacugu

SEQ ID NO: 10035 - RNA, 22 nt, Artificial Sequence
  LDLR targeting guide sequence portion
ucauacauacaacggggacauc

SEQ ID NO: 10036 - RNA, 22 nt, Artificial Sequence
  LDLR targeting guide sequence portion
ucauagcucacgacagccucaa

SEQ ID NO: 10037 - RNA, 22 nt, Artificial Sequence
  LDLR targeting guide sequence portion
ucauccaccaaucucuaagcca

SEQ ID NO: 10038 - RNA, 22 nt, Artificial Sequence
  LDLR targeting guide sequence portion
ucauccugguccccccgggccu

SEQ ID NO: 10039 - RNA, 22 nt, Artificial Sequence
  LDLR targeting guide sequence portion
ucaucugggaggcagaacaggc

SEQ ID NO: 10040 - RNA, 22 nt, Artificial Sequence
  LDLR targeting guide sequence portion
ucaucuuccauguuugaggauu

SEQ ID NO: 10041 - RNA, 22 nt, Artificial Sequence
  LDLR targeting guide sequence portion
ucaugacccacccagugucuuu

SEQ ID NO: 10042 - RNA, 22 nt, Artificial Sequence
  LDLR targeting guide sequence portion
ucaugauucgggggugacaggg

SEQ ID NO: 10043 - RNA, 22 nt, Artificial Sequence
  LDLR targeting guide sequence portion
ucauggcgucggaaaugaucug

SEQ ID NO: 10044 - RNA, 22 nt, Artificial Sequence
  LDLR targeting guide sequence portion
ucauucaccaaaugaugccacu

SEQ ID NO: 10045 - RNA, 22 nt, Artificial Sequence
  LDLR targeting guide sequence portion
ucauucucccaaaaagcguugc

SEQ ID NO: 10046 - RNA, 22 nt, Artificial Sequence
  LDLR targeting guide sequence portion
ucauugacacgggcuuucccug

SEQ ID NO: 10047 - RNA, 22 nt, Artificial Sequence
  LDLR targeting guide sequence portion
ucauuuccgacgccaugaaucc

SEQ ID NO: 10048 - RNA, 22 nt, Artificial Sequence
  LDLR targeting guide sequence portion
ucauuuggugaaugaguuuggu

SEQ ID NO: 10049 - RNA, 22 nt, Artificial Sequence
  LDLR targeting guide sequence portion
ucauuuuuuaagagaugggguc

SEQ ID NO: 10050 - RNA, 22 nt, Artificial Sequence
  LDLR targeting guide sequence portion
uccaacuccugaacucaaguga

SEQ ID NO: 10051 - RNA, 22 nt, Artificial Sequence
  LDLR targeting guide sequence portion
uccaagccauucacuuccccaa

SEQ ID NO: 10052 - RNA, 22 nt, Artificial Sequence
  LDLR targeting guide sequence portion
uccaccaaucucuaagccaaac

SEQ ID NO: 10053 - RNA, 22 nt, Artificial Sequence
  LDLR targeting guide sequence portion
uccaccgugacacaauccucaa

SEQ ID NO: 10054 - RNA, 22 nt, Artificial Sequence
  LDLR targeting guide sequence portion
uccacuucuaugcaaaugccuc

SEQ ID NO: 10055 - RNA, 22 nt, Artificial Sequence
  LDLR targeting guide sequence portion
uccaggaaguuuugaguuucuc

SEQ ID NO: 10056 - RNA, 22 nt, Artificial Sequence
  LDLR targeting guide sequence portion
uccaggcagauguucacgccac

SEQ ID NO: 10057 - RNA, 22 nt, Artificial Sequence
  LDLR targeting guide sequence portion
uccagucuggaucguuugacgg

SEQ ID NO: 10058 - RNA, 22 nt, Artificial Sequence
  LDLR targeting guide sequence portion
uccaguucgugcaaauaaucuu

SEQ ID NO: 10059 - RNA, 22 nt, Artificial Sequence
  LDLR targeting guide sequence portion
uccauguuugaggauuguguca

SEQ ID NO: 10060 - RNA, 22 nt, Artificial Sequence
  LDLR targeting guide sequence portion
uccauucccguggucuccuugc

SEQ ID NO: 10061 - RNA, 22 nt, Artificial Sequence
  LDLR targeting guide sequence portion
uccauuucucuccaggaaguuu

SEQ ID NO: 10062 - RNA, 22 nt, Artificial Sequence
  LDLR targeting guide sequence portion
ucccaaaaagcguugcacacag

SEQ ID NO: 10063 - RNA, 22 nt, Artificial Sequence
  LDLR targeting guide sequence portion
ucccaacacacacgacagaaaa

SEQ ID NO: 10064 - RNA, 22 nt, Artificial Sequence
  LDLR targeting guide sequence portion
ucccaacccaagccauugcaug

SEQ ID NO: 10065 - RNA, 22 nt, Artificial Sequence
  LDLR targeting guide sequence portion
ucccaccucagccucgccaugc

SEQ ID NO: 10066 - RNA, 22 nt, Artificial Sequence
  LDLR targeting guide sequence portion
ucccagaagccacucauacaua

SEQ ID NO: 10067 - RNA, 22 nt, Artificial Sequence
  LDLR targeting guide sequence portion
ucccagaggcagagccugaguc

SEQ ID NO: 10068 - RNA, 22 nt, Artificial Sequence
  LDLR targeting guide sequence portion
ucccaggccagggaaagcccgu

SEQ ID NO: 10069 - RNA, 22 nt, Artificial Sequence
  LDLR targeting guide sequence portion
ucccaucccaacacacacgaca

SEQ ID NO: 10070 - RNA, 22 nt, Artificial Sequence
  LDLR targeting guide sequence portion
ucccaucucuacaaaaaccaaa

SEQ ID NO: 10071 - RNA, 22 nt, Artificial Sequence
  LDLR targeting guide sequence portion
uccccaaucuugucguugaugg

SEQ ID NO: 10072 - RNA, 22 nt, Artificial Sequence
  LDLR targeting guide sequence portion
uccccacuaucuguacagggac

SEQ ID NO: 10073 - RNA, 22 nt, Artificial Sequence
  LDLR targeting guide sequence portion
uccccagggacaaaacacugug

SEQ ID NO: 10074 - RNA, 22 nt, Artificial Sequence
  LDLR targeting guide sequence portion
uccccccgggccuguuucucuu

SEQ ID NO: 10075 - RNA, 22 nt, Artificial Sequence
  LDLR targeting guide sequence portion
uccccggcauucauugacacgg

SEQ ID NO: 10076 - RNA, 22 nt, Artificial Sequence
  LDLR targeting guide sequence portion
uccccguuguauguaugagugg

SEQ ID NO: 10077 - RNA, 22 nt, Artificial Sequence
  LDLR targeting guide sequence portion
uccccuccccuuucaucuucca

SEQ ID NO: 10078 - RNA, 22 nt, Artificial Sequence
  LDLR targeting guide sequence portion
uccccuuucaucuuccauguuu

SEQ ID NO: 10079 - RNA, 22 nt, Artificial Sequence
  LDLR targeting guide sequence portion
ucccgaccccuacccacuucca

SEQ ID NO: 10080 - RNA, 22 nt, Artificial Sequence
  LDLR targeting guide sequence portion
ucccgcgugaagaugucacaag

SEQ ID NO: 10081 - RNA, 22 nt, Artificial Sequence
  LDLR targeting guide sequence portion
ucccggucaaccugccccucuc

SEQ ID NO: 10082 - RNA, 22 nt, Artificial Sequence
  LDLR targeting guide sequence portion
ucccgucaaacgauccagacug

SEQ ID NO: 10083 - RNA, 22 nt, Artificial Sequence
  LDLR targeting guide sequence portion
ucccgucccugcccagaacccu

SEQ ID NO: 10084 - RNA, 22 nt, Artificial Sequence
  LDLR targeting guide sequence portion
ucccguggucuccuugcacuuu

SEQ ID NO: 10085 - RNA, 22 nt, Artificial Sequence
  LDLR targeting guide sequence portion
ucccguuggugccaucugcugu

SEQ ID NO: 10086 - RNA, 22 nt, Artificial Sequence
  LDLR targeting guide sequence portion
ucccugcccagaacccuuccug

SEQ ID NO: 10087 - RNA, 22 nt, Artificial Sequence
  LDLR targeting guide sequence portion
ucccuggccugggaucccaucc

SEQ ID NO: 10088 - RNA, 22 nt, Artificial Sequence
  LDLR targeting guide sequence portion
ucccuggggacaauugccaauc

SEQ ID NO: 10089 - RNA, 22 nt, Artificial Sequence
  LDLR targeting guide sequence portion
ucccuguacagauaguggggau

SEQ ID NO: 10090 - RNA, 22 nt, Artificial Sequence
  LDLR targeting guide sequence portion
ucccuugugacaucuucacgcg

SEQ ID NO: 10091 - RNA, 22 nt, Artificial Sequence
  LDLR targeting guide sequence portion
ucccuuuccuggcuuaaggaag

SEQ ID NO: 10092 - RNA, 22 nt, Artificial Sequence
  LDLR targeting guide sequence portion
uccgaaaccagaaaggcuuauc

SEQ ID NO: 10093 - RNA, 22 nt, Artificial Sequence
  LDLR targeting guide sequence portion
uccgaagccuguucugccuccc

SEQ ID NO: 10094 - RNA, 22 nt, Artificial Sequence
  LDLR targeting guide sequence portion
uccgacgccaugaaucccuuuc

SEQ ID NO: 10095 - RNA, 22 nt, Artificial Sequence
  LDLR targeting guide sequence portion
uccgcccaccuagugcuuccac

SEQ ID NO: 10096 - RNA, 22 nt, Artificial Sequence
  LDLR targeting guide sequence portion
uccggacaucagugcaacagua

SEQ ID NO: 10097 - RNA, 22 nt, Artificial Sequence
  LDLR targeting guide sequence portion
uccggagagacagugacagccu

SEQ ID NO: 10098 - RNA, 22 nt, Artificial Sequence
  LDLR targeting guide sequence portion
uccgucagacucccgcgugaag

SEQ ID NO: 10099 - RNA, 22 nt, Artificial Sequence
  LDLR targeting guide sequence portion
uccgugguggcaccgagaccaa

SEQ ID NO: 10100 - RNA, 22 nt, Artificial Sequence
  LDLR targeting guide sequence portion
uccucaaacauggaagaugaaa

SEQ ID NO: 10101 - RNA, 22 nt, Artificial Sequence
  LDLR targeting guide sequence portion
uccucacggccaagguaaccgg

SEQ ID NO: 10102 - RNA, 22 nt, Artificial Sequence
  LDLR targeting guide sequence portion
uccuccagucuggaucguuuga

SEQ ID NO: 10103 - RNA, 22 nt, Artificial Sequence
  LDLR targeting guide sequence portion
uccucccaccucagccucgcca

SEQ ID NO: 10104 - RNA, 22 nt, Artificial Sequence
  LDLR targeting guide sequence portion
uccucccgaccccuacccacuu

SEQ ID NO: 10105 - RNA, 22 nt, Artificial Sequence
  LDLR targeting guide sequence portion
uccucgugaaggauaagagaaa

SEQ ID NO: 10106 - RNA, 22 nt, Artificial Sequence
  LDLR targeting guide sequence portion
uccugaacucaagugauccagc

SEQ ID NO: 10107 - RNA, 22 nt, Artificial Sequence
  LDLR targeting guide sequence portion
uccugacagccacaccugggug

SEQ ID NO: 10108 - RNA, 22 nt, Artificial Sequence
  LDLR targeting guide sequence portion
uccugagaccucgccggccuug

SEQ ID NO: 10109 - RNA, 22 nt, Artificial Sequence
  LDLR targeting guide sequence portion
uccugaguuuagggguuuggcu

SEQ ID NO: 10110 - RNA, 22 nt, Artificial Sequence
  LDLR targeting guide sequence portion
uccuggagagaaauggaggugu

SEQ ID NO: 10111 - RNA, 22 nt, Artificial Sequence
  LDLR targeting guide sequence portion
uccuggcuuaaggaagguacaa

SEQ ID NO: 10112 - RNA, 22 nt, Artificial Sequence
  LDLR targeting guide sequence portion
uccugguccccccgggccuguu

SEQ ID NO: 10113 - RNA, 22 nt, Artificial Sequence
  LDLR targeting guide sequence portion
uccuuaagccaggaaagggauu

SEQ ID NO: 10114 - RNA, 22 nt, Artificial Sequence
  LDLR targeting guide sequence portion
uccuucacgaggaaaggaagaa

SEQ ID NO: 10115 - RNA, 22 nt, Artificial Sequence
  LDLR targeting guide sequence portion
uccuugcacuuucucaguucag

SEQ ID NO: 10116 - RNA, 22 nt, Artificial Sequence
  LDLR targeting guide sequence portion
uccuuuccucgugaaggauaag

SEQ ID NO: 10117 - RNA, 22 nt, Artificial Sequence
  LDLR targeting guide sequence portion
ucgaaagacacuggguggguca

SEQ ID NO: 10118 - RNA, 22 nt, Artificial Sequence
  LDLR targeting guide sequence portion
ucgagaacugccauugucgucu

SEQ ID NO: 10119 - RNA, 22 nt, Artificial Sequence
  LDLR targeting guide sequence portion
ucgagguggguuuguaccuucc

SEQ ID NO: 10120 - RNA, 22 nt, Artificial Sequence
  LDLR targeting guide sequence portion
ucgauauucacgaucacggcuu

SEQ ID NO: 10121 - RNA, 22 nt, Artificial Sequence
  LDLR targeting guide sequence portion
ucgaucauggcucacugcaacc

SEQ ID NO: 10122 - RNA, 22 nt, Artificial Sequence
  LDLR targeting guide sequence portion
ucgccaugccuggccagaggcc

SEQ ID NO: 10123 - RNA, 22 nt, Artificial Sequence
  LDLR targeting guide sequence portion
ucgccggccuuguuuuauucaa

SEQ ID NO: 10124 - RNA, 22 nt, Artificial Sequence
  LDLR targeting guide sequence portion
ucgccguguuacuguugcacug

SEQ ID NO: 10125 - RNA, 22 nt, Artificial Sequence
  LDLR targeting guide sequence portion
ucgcuuuguugcucaggccugg

SEQ ID NO: 10126 - RNA, 22 nt, Artificial Sequence
  LDLR targeting guide sequence portion
ucggaaaugaucuggcugaauc

SEQ ID NO: 10127 - RNA, 22 nt, Artificial Sequence
  LDLR targeting guide sequence portion
ucggacagugcccaugcaaugg

SEQ ID NO: 10128 - RNA, 22 nt, Artificial Sequence
  LDLR targeting guide sequence portion
ucggagcacguaaaugcguccc

SEQ ID NO: 10129 - RNA, 22 nt, Artificial Sequence
  LDLR targeting guide sequence portion
ucgggaggaugggcaccaggcu

SEQ ID NO: 10130 - RNA, 22 nt, Artificial Sequence
  LDLR targeting guide sequence portion
ucggggcccuguguaggggguu

SEQ ID NO: 10131 - RNA, 22 nt, Artificial Sequence
  LDLR targeting guide sequence portion
ucgggggugacagggcaaaggc

SEQ ID NO: 10132 - RNA, 22 nt, Artificial Sequence
  LDLR targeting guide sequence portion
ucggugccaccacggauucagc

SEQ ID NO: 10133 - RNA, 22 nt, Artificial Sequence
  LDLR targeting guide sequence portion
ucgucuuuauguccgcccaccu

SEQ ID NO: 10134 - RNA, 22 nt, Artificial Sequence
  LDLR targeting guide sequence portion
ucgugaaggauaagagaaacag

SEQ ID NO: 10135 - RNA, 22 nt, Artificial Sequence
  LDLR targeting guide sequence portion
ucgugaauaucgagaacugcca

SEQ ID NO: 10136 - RNA, 22 nt, Artificial Sequence
  LDLR targeting guide sequence portion
ucgugagcuaugauuaugccac

SEQ ID NO: 10137 - RNA, 22 nt, Artificial Sequence
  LDLR targeting guide sequence portion
ucguguguguugggaugggauc

SEQ ID NO: 10138 - RNA, 22 nt, Artificial Sequence
  LDLR targeting guide sequence portion
ucguugauggguauguguuuaa

SEQ ID NO: 10139 - RNA, 22 nt, Artificial Sequence
  LDLR targeting guide sequence portion
ucguuugacgggacuucagguu

SEQ ID NO: 10140 - RNA, 22 nt, Artificial Sequence
  LDLR targeting guide sequence portion
ucuaagccaaaccccuaaacuc

SEQ ID NO: 10141 - RNA, 22 nt, Artificial Sequence
  LDLR targeting guide sequence portion
ucuagcaaggcuugcauagaag

SEQ ID NO: 10142 - RNA, 22 nt, Artificial Sequence
  LDLR targeting guide sequence portion
ucuauacagugguuuaaaaagu

SEQ ID NO: 10143 - RNA, 22 nt, Artificial Sequence
  LDLR targeting guide sequence portion
ucuaugcaaaugccuccaagcc

SEQ ID NO: 10144 - RNA, 22 nt, Artificial Sequence
  LDLR targeting guide sequence portion
ucuaugcaagccuugcuagaca

SEQ ID NO: 10145 - RNA, 22 nt, Artificial Sequence
  LDLR targeting guide sequence portion
ucuauuuauuuuugcaaacccu

SEQ ID NO: 10146 - RNA, 22 nt, Artificial Sequence
  LDLR targeting guide sequence portion
ucucaggaaggguucugggcag

SEQ ID NO: 10147 - RNA, 22 nt, Artificial Sequence
  LDLR targeting guide sequence portion
ucucaggcacuuaauaaauauu

SEQ ID NO: 10148 - RNA, 22 nt, Artificial Sequence
  LDLR targeting guide sequence portion
ucucaguucagaguuguacacu

SEQ ID NO: 10149 - RNA, 22 nt, Artificial Sequence
  LDLR targeting guide sequence portion
ucuccaccgugacacaauccuc

SEQ ID NO: 10150 - RNA, 22 nt, Artificial Sequence
  LDLR targeting guide sequence portion
ucuccaggaaguuuugaguuuc

SEQ ID NO: 10151 - RNA, 22 nt, Artificial Sequence
  LDLR targeting guide sequence portion
ucucccaaaaagcguugcacac

SEQ ID NO: 10152 - RNA, 22 nt, Artificial Sequence
  LDLR targeting guide sequence portion
ucucccagaagccacucauaca

SEQ ID NO: 10153 - RNA, 22 nt, Artificial Sequence
  LDLR targeting guide sequence portion
ucuccggacaucagugcaacag

SEQ ID NO: 10154 - RNA, 22 nt, Artificial Sequence
  LDLR targeting guide sequence portion
ucuccuugcacuuucucaguuc

SEQ ID NO: 10155 - RNA, 22 nt, Artificial Sequence
  LDLR targeting guide sequence portion
ucucgauauucacgaucacggc

SEQ ID NO: 10156 - RNA, 22 nt, Artificial Sequence
  LDLR targeting guide sequence portion
ucucgcuuuguugcucaggccu

SEQ ID NO: 10157 - RNA, 22 nt, Artificial Sequence
  LDLR targeting guide sequence portion
ucucggggcccuguguaggggg

SEQ ID NO: 10158 - RNA, 22 nt, Artificial Sequence
  LDLR targeting guide sequence portion
ucucggugccaccacggauuca

SEQ ID NO: 10159 - RNA, 22 nt, Artificial Sequence
  LDLR targeting guide sequence portion
ucucuaagccaaaccccuaaac

SEQ ID NO: 10160 - RNA, 22 nt, Artificial Sequence
  LDLR targeting guide sequence portion
ucucuccaccgugacacaaucc

SEQ ID NO: 10161 - RNA, 22 nt, Artificial Sequence
  LDLR targeting guide sequence portion
ucucuccaggaaguuuugaguu

SEQ ID NO: 10162 - RNA, 22 nt, Artificial Sequence
  LDLR targeting guide sequence portion
ucucuccggacaucagugcaac

SEQ ID NO: 10163 - RNA, 22 nt, Artificial Sequence
  LDLR targeting guide sequence portion
ucucugggccugacauccccuc

SEQ ID NO: 10164 - RNA, 22 nt, Artificial Sequence
  LDLR targeting guide sequence portion
ucucuguccccggcauucauug

SEQ ID NO: 10165 - RNA, 22 nt, Artificial Sequence
  LDLR targeting guide sequence portion
ucucugucuuugaauaaaacaa

SEQ ID NO: 10166 - RNA, 22 nt, Artificial Sequence
  LDLR targeting guide sequence portion
ucucuuaaaaaaugaauuuggc

SEQ ID NO: 10167 - RNA, 22 nt, Artificial Sequence
  LDLR targeting guide sequence portion
ucucuuauccuucacgaggaaa

SEQ ID NO: 10168 - RNA, 22 nt, Artificial Sequence
  LDLR targeting guide sequence portion
ucugaaauagggucuucaucug

SEQ ID NO: 10169 - RNA, 22 nt, Artificial Sequence
  LDLR targeting guide sequence portion
ucugaaaucgccguguuacugu

SEQ ID NO: 10170 - RNA, 22 nt, Artificial Sequence
  LDLR targeting guide sequence portion
ucugaaaugccucuucuuuaug

SEQ ID NO: 10171 - RNA, 22 nt, Artificial Sequence
  LDLR targeting guide sequence portion
ucugaacugagaaagugcaagg

SEQ ID NO: 10172 - RNA, 22 nt, Artificial Sequence
  LDLR targeting guide sequence portion
ucugacggaggcugucacuguc

SEQ ID NO: 10173 - RNA, 22 nt, Artificial Sequence
  LDLR targeting guide sequence portion
ucugccucccagaugaauaaau

SEQ ID NO: 10174 - RNA, 22 nt, Artificial Sequence
  LDLR targeting guide sequence portion
ucugccucugggaaguggcauc

SEQ ID NO: 10175 - RNA, 22 nt, Artificial Sequence
  LDLR targeting guide sequence portion
ucugccuggagucccgucccug

SEQ ID NO: 10176 - RNA, 22 nt, Artificial Sequence
  LDLR targeting guide sequence portion
ucugcuguuguguguugaaagc

SEQ ID NO: 10177 - RNA, 22 nt, Artificial Sequence
  LDLR targeting guide sequence portion
ucuggaggaugacguggcguga

SEQ ID NO: 10178 - RNA, 22 nt, Artificial Sequence
  LDLR targeting guide sequence portion
ucuggaucguuugacgggacuu

SEQ ID NO: 10179 - RNA, 22 nt, Artificial Sequence
  LDLR targeting guide sequence portion
ucuggcaggcaaugcuuugguc

SEQ ID NO: 10180 - RNA, 22 nt, Artificial Sequence
  LDLR targeting guide sequence portion
ucuggccaaauucauuuuuuaa

SEQ ID NO: 10181 - RNA, 22 nt, Artificial Sequence
  LDLR targeting guide sequence portion
ucuggccaggcauggcgaggcu

SEQ ID NO: 10182 - RNA, 22 nt, Artificial Sequence
  LDLR targeting guide sequence portion
ucuggcugaauccgugguggca

SEQ ID NO: 10183 - RNA, 22 nt, Artificial Sequence
  LDLR targeting guide sequence portion
ucugggaaguggcaucauuugg

SEQ ID NO: 10184 - RNA, 22 nt, Artificial Sequence
  LDLR targeting guide sequence portion
ucugggagaugggugucacuuu

SEQ ID NO: 10185 - RNA, 22 nt, Artificial Sequence
  LDLR targeting guide sequence portion
ucugggaggcagaacaggcuuc

SEQ ID NO: 10186 - RNA, 22 nt, Artificial Sequence
  LDLR targeting guide sequence portion
ucugggcagggacgggacucca

SEQ ID NO: 10187 - RNA, 22 nt, Artificial Sequence
  LDLR targeting guide sequence portion
ucugggccugacauccccuccc

SEQ ID NO: 10188 - RNA, 22 nt, Artificial Sequence
  LDLR targeting guide sequence portion
ucugguuucggagcacguaaau

SEQ ID NO: 10189 - RNA, 22 nt, Artificial Sequence
  LDLR targeting guide sequence portion
ucuguacagggacgcauuuacg

SEQ ID NO: 10190 - RNA, 22 nt, Artificial Sequence
  LDLR targeting guide sequence portion
ucuguccccggcauucauugac

SEQ ID NO: 10191 - RNA, 22 nt, Artificial Sequence
  LDLR targeting guide sequence portion
ucugucguguguguugggaugg

SEQ ID NO: 10192 - RNA, 22 nt, Artificial Sequence
  LDLR targeting guide sequence portion
ucugucuuugaauaaaacaagg

SEQ ID NO: 10193 - RNA, 22 nt, Artificial Sequence
  LDLR targeting guide sequence portion
ucuuaaaaaaugaauuuggcca

SEQ ID NO: 10194 - RNA, 22 nt, Artificial Sequence
  LDLR targeting guide sequence portion
ucuuacuauguugcccaggcug

SEQ ID NO: 10195 - RNA, 22 nt, Artificial Sequence
  LDLR targeting guide sequence portion
ucuuauccuucacgaggaaagg

SEQ ID NO: 10196 - RNA, 22 nt, Artificial Sequence
  LDLR targeting guide sequence portion
ucuucacgcgggagucugacgg

SEQ ID NO: 10197 - RNA, 22 nt, Artificial Sequence
  LDLR targeting guide sequence portion
ucuuccauguuugaggauugug

SEQ ID NO: 10198 - RNA, 22 nt, Artificial Sequence
  LDLR targeting guide sequence portion
ucuuccuuuccucgugaaggau

SEQ ID NO: 10199 - RNA, 22 nt, Artificial Sequence
  LDLR targeting guide sequence portion
ucuucuaugcaagccuugcuag

SEQ ID NO: 10200 - RNA, 22 nt, Artificial Sequence
  LDLR targeting guide sequence portion
ucuucucugucuuugaauaaaa

SEQ ID NO: 10201 - RNA, 22 nt, Artificial Sequence
  LDLR targeting guide sequence portion
ucuugucguugauggguaugug

SEQ ID NO: 10202 - RNA, 22 nt, Artificial Sequence
  LDLR targeting guide sequence portion
ucuuuauguccgcccaccuagu

SEQ ID NO: 10203 - RNA, 22 nt, Artificial Sequence
  LDLR targeting guide sequence portion
ucuuucgagguggguuuguacc

SEQ ID NO: 10204 - RNA, 22 nt, Artificial Sequence
  LDLR targeting guide sequence portion
ucuuucugaaaucgccguguua

SEQ ID NO: 10205 - RNA, 22 nt, Artificial Sequence
  LDLR targeting guide sequence portion
ucuuugaauaaaacaaggccgg

SEQ ID NO: 10206 - RNA, 22 nt, Artificial Sequence
  LDLR targeting guide sequence portion
ucuuuguacauaaagaagaggc

SEQ ID NO: 10207 - RNA, 22 nt, Artificial Sequence
  LDLR targeting guide sequence portion
ugaaagccacuugcuucucugg

SEQ ID NO: 10208 - RNA, 22 nt, Artificial Sequence
  LDLR targeting guide sequence portion
ugaaaggggaggggaugucagg

SEQ ID NO: 10209 - RNA, 22 nt, Artificial Sequence
  LDLR targeting guide sequence portion
ugaaaucgccguguuacuguug

SEQ ID NO: 10210 - RNA, 22 nt, Artificial Sequence
  LDLR targeting guide sequence portion
ugaaaugccucuucuuuaugua

SEQ ID NO: 10211 - RNA, 22 nt, Artificial Sequence
  LDLR targeting guide sequence portion
ugaacaaauacagcaaccaggg

SEQ ID NO: 10212 - RNA, 22 nt, Artificial Sequence
  LDLR targeting guide sequence portion
ugaacaucugccuggagucccg

SEQ ID NO: 10213 - RNA, 22 nt, Artificial Sequence
  LDLR targeting guide sequence portion
ugaacucaagugauccagcuca

SEQ ID NO: 10214 - RNA, 22 nt, Artificial Sequence
  LDLR targeting guide sequence portion
ugaacugagaaagugcaaggag

SEQ ID NO: 10215 - RNA, 22 nt, Artificial Sequence
  LDLR targeting guide sequence portion
ugaagacccuauuucagaaaua

SEQ ID NO: 10216 - RNA, 22 nt, Artificial Sequence
  LDLR targeting guide sequence portion
ugaagaugucacaagggauugg

SEQ ID NO: 10217 - RNA, 22 nt, Artificial Sequence
  LDLR targeting guide sequence portion
ugaaggauaagagaaacaggcc

SEQ ID NO: 10218 - RNA, 22 nt, Artificial Sequence
  LDLR targeting guide sequence portion
ugaagucccggucaaccugccc

SEQ ID NO: 10219 - RNA, 22 nt, Artificial Sequence
  LDLR targeting guide sequence portion
ugaagucccgucaaacgaucca

SEQ ID NO: 10220 - RNA, 22 nt, Artificial Sequence
  LDLR targeting guide sequence portion
ugaauaaaacaaggccggcgag

SEQ ID NO: 10221 - RNA, 22 nt, Artificial Sequence
  LDLR targeting guide sequence portion
ugaauaucgagaacugccauug

SEQ ID NO: 10222 - RNA, 22 nt, Artificial Sequence
  LDLR targeting guide sequence portion
ugaaucccuuuccuggcuuaag

SEQ ID NO: 10223 - RNA, 22 nt, Artificial Sequence
  LDLR targeting guide sequence portion
ugaauccgugguggcaccgaga

SEQ ID NO: 10224 - RNA, 22 nt, Artificial Sequence
  LDLR targeting guide sequence portion
ugaaugaguuuggucucggugc

SEQ ID NO: 10225 - RNA, 22 nt, Artificial Sequence
  LDLR targeting guide sequence portion
ugaaugccggggacagagaggg

SEQ ID NO: 10226 - RNA, 22 nt, Artificial Sequence
  LDLR targeting guide sequence portion
ugaauggcuuggaggcauuugc

SEQ ID NO: 10227 - RNA, 22 nt, Artificial Sequence
  LDLR targeting guide sequence portion
ugaauuuggccagacacaggug

SEQ ID NO: 10228 - RNA, 22 nt, Artificial Sequence
  LDLR targeting guide sequence portion
ugacacaauccucaaacaugga

SEQ ID NO: 10229 - RNA, 22 nt, Artificial Sequence
  LDLR targeting guide sequence portion
ugacacccaucucccagaagcc

SEQ ID NO: 10230 - RNA, 22 nt, Artificial Sequence
  LDLR targeting guide sequence portion
ugacaccuccauuucucuccag

SEQ ID NO: 10231 - RNA, 22 nt, Artificial Sequence
  LDLR targeting guide sequence portion
ugacacgggcuuucccuggccu

SEQ ID NO: 10232 - RNA, 22 nt, Artificial Sequence
  LDLR targeting guide sequence portion
ugacagccacaccugggugcag

SEQ ID NO: 10233 - RNA, 22 nt, Artificial Sequence
  LDLR targeting guide sequence portion
ugacagccuccgucagacuccc

SEQ ID NO: 10234 - RNA, 22 nt, Artificial Sequence
  LDLR targeting guide sequence portion
ugacagggcaaaggcuaaccug

SEQ ID NO: 10235 - RNA, 22 nt, Artificial Sequence
  LDLR targeting guide sequence portion
ugacauccccuccccuuucauc

SEQ ID NO: 10236 - RNA, 22 nt, Artificial Sequence
  LDLR targeting guide sequence portion
ugacaucuucacgcgggagucu

SEQ ID NO: 10237 - RNA, 22 nt, Artificial Sequence
  LDLR targeting guide sequence portion
ugaccagugacucaggcucugc

SEQ ID NO: 10238 - RNA, 22 nt, Artificial Sequence
  LDLR targeting guide sequence portion
ugacccacccagugucuuucga

SEQ ID NO: 10239 - RNA, 22 nt, Artificial Sequence
  LDLR targeting guide sequence portion
ugaccgggacuucaaagccgug

SEQ ID NO: 10240 - RNA, 22 nt, Artificial Sequence
  LDLR targeting guide sequence portion
ugacggaggcugucacugucuc

SEQ ID NO: 10241 - RNA, 22 nt, Artificial Sequence
  LDLR targeting guide sequence portion
ugacgggacuucagguucuuuc

SEQ ID NO: 10242 - RNA, 22 nt, Artificial Sequence
  LDLR targeting guide sequence portion
ugacguggcgugaacaucugcc

SEQ ID NO: 10243 - RNA, 22 nt, Artificial Sequence
  LDLR targeting guide sequence portion
ugacuauucucggggcccugug

SEQ ID NO: 10244 - RNA, 22 nt, Artificial Sequence
  LDLR targeting guide sequence portion
ugacucaggcucugccucuggg

SEQ ID NO: 10245 - RNA, 22 nt, Artificial Sequence
  LDLR targeting guide sequence portion
ugacuccugaguuuagggguuu

SEQ ID NO: 10246 - RNA, 22 nt, Artificial Sequence
  LDLR targeting guide sequence portion
ugagaaagugcaaggagaccac

SEQ ID NO: 10247 - RNA, 22 nt, Artificial Sequence
  LDLR targeting guide sequence portion
ugagacacccgguuaccuuggc

SEQ ID NO: 10248 - RNA, 22 nt, Artificial Sequence
  LDLR targeting guide sequence portion
ugagaccucgccggccuuguuu

SEQ ID NO: 10249 - RNA, 22 nt, Artificial Sequence
  LDLR targeting guide sequence portion
ugagcaacaaagcgagauccca

SEQ ID NO: 10250 - RNA, 22 nt, Artificial Sequence
  LDLR targeting guide sequence portion
ugagccacugcgcccggccuca

SEQ ID NO: 10251 - RNA, 22 nt, Artificial Sequence
  LDLR targeting guide sequence portion
ugagcuaugauuaugccacugc

SEQ ID NO: 10252 - RNA, 22 nt, Artificial Sequence
  LDLR targeting guide sequence portion
ugagcucaggcauuugaggcug

SEQ ID NO: 10253 - RNA, 22 nt, Artificial Sequence
  LDLR targeting guide sequence portion
ugagcuggaucacuugaguuca

SEQ ID NO: 10254 - RNA, 22 nt, Artificial Sequence
  LDLR targeting guide sequence portion
ugaggacacguggccugcaccc

SEQ ID NO: 10255 - RNA, 22 nt, Artificial Sequence
  LDLR targeting guide sequence portion
ugaggauugugucacgguggag

SEQ ID NO: 10256 - RNA, 22 nt, Artificial Sequence
  LDLR targeting guide sequence portion
ugaggcaccugugucuggccaa

SEQ ID NO: 10257 - RNA, 22 nt, Artificial Sequence
  LDLR targeting guide sequence portion
ugaggcugucgugagcuaugau

SEQ ID NO: 10258 - RNA, 22 nt, Artificial Sequence
  LDLR targeting guide sequence portion
ugagucacuggucacccuuaau

SEQ ID NO: 10259 - RNA, 22 nt, Artificial Sequence
  LDLR targeting guide sequence portion
ugaguggcuucugggagauggg

SEQ ID NO: 10260 - RNA, 22 nt, Artificial Sequence
  LDLR targeting guide sequence portion
ugaguucaggaguuggagacca

SEQ ID NO: 10261 - RNA, 22 nt, Artificial Sequence
  LDLR targeting guide sequence portion
ugaguuuagggguuuggcuuag

SEQ ID NO: 10262 - RNA, 22 nt, Artificial Sequence
  LDLR targeting guide sequence portion
ugaguuucucuccaccgugaca

SEQ ID NO: 10263 - RNA, 22 nt, Artificial Sequence
  LDLR targeting guide sequence portion
ugaguuuggucucggugccacc

SEQ ID NO: 10264 - RNA, 22 nt, Artificial Sequence
  LDLR targeting guide sequence portion
ugauaagccuuucugguuucgg

SEQ ID NO: 10265 - RNA, 22 nt, Artificial Sequence
  LDLR targeting guide sequence portion
ugaucacaguaagacauucagg

SEQ ID NO: 10266 - RNA, 22 nt, Artificial Sequence
  LDLR targeting guide sequence portion
ugauccagcucagccucccaaa

SEQ ID NO: 10267 - RNA, 22 nt, Artificial Sequence
  LDLR targeting guide sequence portion
ugaucgugaauaucgagaacug

SEQ ID NO: 10268 - RNA, 22 nt, Artificial Sequence
  LDLR targeting guide sequence portion
ugaucuggcugaauccguggug

SEQ ID NO: 10269 - RNA, 22 nt, Artificial Sequence
  LDLR targeting guide sequence portion
ugaugccacuucccagaggcag

SEQ ID NO: 10270 - RNA, 22 nt, Artificial Sequence
  LDLR targeting guide sequence portion
ugauggguauguguuuaaaaca

SEQ ID NO: 10271 - RNA, 22 nt, Artificial Sequence
  LDLR targeting guide sequence portion
ugauguccccguuguauguaug

SEQ ID NO: 10272 - RNA, 22 nt, Artificial Sequence
  LDLR targeting guide sequence portion
ugauguccggagagacagugac

SEQ ID NO: 10273 - RNA, 22 nt, Artificial Sequence
  LDLR targeting guide sequence portion
ugauuaugccacugcuuuccag

SEQ ID NO: 10274 - RNA, 22 nt, Artificial Sequence
  LDLR targeting guide sequence portion
ugauucgggggugacagggcaa

SEQ ID NO: 10275 - RNA, 22 nt, Artificial Sequence
  LDLR targeting guide sequence portion
ugcaaacauaacaaaaaauccc

SEQ ID NO: 10276 - RNA, 22 nt, Artificial Sequence
  LDLR targeting guide sequence portion
ugcaaacccugguugcuguauu

SEQ ID NO: 10277 - RNA, 22 nt, Artificial Sequence
  LDLR targeting guide sequence portion
ugcaaaugccuccaagccauuc

SEQ ID NO: 10278 - RNA, 22 nt, Artificial Sequence
  LDLR targeting guide sequence portion
ugcaacaguaacacggcgauuu

SEQ ID NO: 10279 - RNA, 22 nt, Artificial Sequence
  LDLR targeting guide sequence portion
ugcaacgcuuuuugggagaaug

SEQ ID NO: 10280 - RNA, 22 nt, Artificial Sequence
  LDLR targeting guide sequence portion
ugcaagccuugcuagacagcca

SEQ ID NO: 10281 - RNA, 22 nt, Artificial Sequence
  LDLR targeting guide sequence portion
ugcaaggagaccacgggaaugg

SEQ ID NO: 10282 - RNA, 22 nt, Artificial Sequence
  LDLR targeting guide sequence portion
ugcaauggcuuggguugggauu

SEQ ID NO: 10283 - RNA, 22 nt, Artificial Sequence
  LDLR targeting guide sequence portion
ugcacccagguguggcugucag

SEQ ID NO: 10284 - RNA, 22 nt, Artificial Sequence
  LDLR targeting guide sequence portion
ugcacgaacuggacugugugca

SEQ ID NO: 10285 - RNA, 22 nt, Artificial Sequence
  LDLR targeting guide sequence portion
ugcacggugaggccgggcgcag

SEQ ID NO: 10286 - RNA, 22 nt, Artificial Sequence
  LDLR targeting guide sequence portion
ugcacugauguccggagagaca

SEQ ID NO: 10287 - RNA, 22 nt, Artificial Sequence
  LDLR targeting guide sequence portion
ugcacuguuuucugucgugugu

SEQ ID NO: 10288 - RNA, 22 nt, Artificial Sequence
  LDLR targeting guide sequence portion
ugcacuuucucaguucagaguu

SEQ ID NO: 10289 - RNA, 22 nt, Artificial Sequence
  LDLR targeting guide sequence portion
ugcacuuuguauauugguugaa

SEQ ID NO: 10290 - RNA, 22 nt, Artificial Sequence
  LDLR targeting guide sequence portion
ugcaggccacguguccucacgg

SEQ ID NO: 10291 - RNA, 22 nt, Artificial Sequence
  LDLR targeting guide sequence portion
ugcagggaaccgugauaagccu

SEQ ID NO: 10292 - RNA, 22 nt, Artificial Sequence
  LDLR targeting guide sequence portion
ugcauagaagagguaaacacgu

SEQ ID NO: 10293 - RNA, 22 nt, Artificial Sequence
  LDLR targeting guide sequence portion
ugcauagaaguggaagcacuag

SEQ ID NO: 10294 - RNA, 22 nt, Artificial Sequence
  LDLR targeting guide sequence portion
ugcaucagcagcccauggccuc

SEQ ID NO: 10295 - RNA, 22 nt, Artificial Sequence
  LDLR targeting guide sequence portion
ugcaugggcacuguccgaagcc

SEQ ID NO: 10296 - RNA, 22 nt, Artificial Sequence
  LDLR targeting guide sequence portion
ugcauggugcaucagcagccca

SEQ ID NO: 10297 - RNA, 22 nt, Artificial Sequence
  LDLR targeting guide sequence portion
ugcauguuuuaaacacauaccc

SEQ ID NO: 10298 - RNA, 22 nt, Artificial Sequence
  LDLR targeting guide sequence portion
ugccaaauguacacaguguaca

SEQ ID NO: 10299 - RNA, 22 nt, Artificial Sequence
  LDLR targeting guide sequence portion
ugccaaucccuugugacaucuu

SEQ ID NO: 10300 - RNA, 22 nt, Artificial Sequence
  LDLR targeting guide sequence portion
ugccaccacggauucagccaga

SEQ ID NO: 10301 - RNA, 22 nt, Artificial Sequence
  LDLR targeting guide sequence portion
ugccaccguacccagcugauuu

SEQ ID NO: 10302 - RNA, 22 nt, Artificial Sequence
  LDLR targeting guide sequence portion
ugccacugcuuuccagccuggg

SEQ ID NO: 10303 - RNA, 22 nt, Artificial Sequence
  LDLR targeting guide sequence portion
ugccacuucccagaggcagagc

SEQ ID NO: 10304 - RNA, 22 nt, Artificial Sequence
  LDLR targeting guide sequence portion
ugccaucugcuguuguguguug

SEQ ID NO: 10305 - RNA, 22 nt, Artificial Sequence
  LDLR targeting guide sequence portion
ugccauugucgucuuuaugucc

SEQ ID NO: 10306 - RNA, 22 nt, Artificial Sequence
  LDLR targeting guide sequence portion
ugcccagaacccuuccugagac

SEQ ID NO: 10307 - RNA, 22 nt, Artificial Sequence
  LDLR targeting guide sequence portion
ugcccaggcuggaaagcagugg

SEQ ID NO: 10308 - RNA, 22 nt, Artificial Sequence
  LDLR targeting guide sequence portion
ugcccauccucccgaccccuac

SEQ ID NO: 10309 - RNA, 22 nt, Artificial Sequence
  LDLR targeting guide sequence portion
ugcccaugcaauggcuuggguu

SEQ ID NO: 10310 - RNA, 22 nt, Artificial Sequence
  LDLR targeting guide sequence portion
ugccccucucuguccccggcau

SEQ ID NO: 10311 - RNA, 22 nt, Artificial Sequence
  LDLR targeting guide sequence portion
ugcccugucacccccgaaucau

SEQ ID NO: 10312 - RNA, 22 nt, Artificial Sequence
  LDLR targeting guide sequence portion
ugccggggacagagaggggcag

SEQ ID NO: 10313 - RNA, 22 nt, Artificial Sequence
  LDLR targeting guide sequence portion
ugccucauccaccaaucucuaa

SEQ ID NO: 10314 - RNA, 22 nt, Artificial Sequence
  LDLR targeting guide sequence portion
ugccuccaagccauucacuucc

SEQ ID NO: 10315 - RNA, 22 nt, Artificial Sequence
  LDLR targeting guide sequence portion
ugccucugaaaugccucuucuu

SEQ ID NO: 10316 - RNA, 22 nt, Artificial Sequence
  LDLR targeting guide sequence portion
ugccucugggaaguggcaucau

SEQ ID NO: 10317 - RNA, 22 nt, Artificial Sequence
  LDLR targeting guide sequence portion
ugccugagacacccgguuaccu

SEQ ID NO: 10318 - RNA, 22 nt, Artificial Sequence
  LDLR targeting guide sequence portion
ugccugagcucaaaccauccuc

SEQ ID NO: 10319 - RNA, 22 nt, Artificial Sequence
  LDLR targeting guide sequence portion
ugccugccagagcuuuguuuua

SEQ ID NO: 10320 - RNA, 22 nt, Artificial Sequence
  LDLR targeting guide sequence portion
ugccuggagucccgucccugcc

SEQ ID NO: 10321 - RNA, 22 nt, Artificial Sequence
  LDLR targeting guide sequence portion
ugccuggccagaggccaugggc

SEQ ID NO: 10322 - RNA, 22 nt, Artificial Sequence
  LDLR targeting guide sequence portion
ugcgcccggccucaccgugcau

SEQ ID NO: 10323 - RNA, 22 nt, Artificial Sequence
  LDLR targeting guide sequence portion
ugcgucccuguacagauagugg

SEQ ID NO: 10324 - RNA, 22 nt, Artificial Sequence
  LDLR targeting guide sequence portion
ugcuagacagccagguuagccu

SEQ ID NO: 10325 - RNA, 22 nt, Artificial Sequence
  LDLR targeting guide sequence portion
ugcucaggccuggucuccaacu

SEQ ID NO: 10326 - RNA, 22 nt, Artificial Sequence
  LDLR targeting guide sequence portion
ugcuccgaaaccagaaaggcuu

SEQ ID NO: 10327 - RNA, 22 nt, Artificial Sequence
  LDLR targeting guide sequence portion
ugcuguauuuguucagugacua

SEQ ID NO: 10328 - RNA, 22 nt, Artificial Sequence
  LDLR targeting guide sequence portion
ugcuguuguguguugaaagcca

SEQ ID NO: 10329 - RNA, 22 nt, Artificial Sequence
  LDLR targeting guide sequence portion
ugcuuccacuucuaugcaaaug

SEQ ID NO: 10330 - RNA, 22 nt, Artificial Sequence
  LDLR targeting guide sequence portion
ugcuucucugggccugacaucc

SEQ ID NO: 10331 - RNA, 22 nt, Artificial Sequence
  LDLR targeting guide sequence portion
ugcuuuccagccugggcaacau

SEQ ID NO: 10332 - RNA, 22 nt, Artificial Sequence
  LDLR targeting guide sequence portion
ugcuuuggucuucucugucuuu

SEQ ID NO: 10333 - RNA, 22 nt, Artificial Sequence
  LDLR targeting guide sequence portion
uggaaagcaguggcauaaucau

SEQ ID NO: 10334 - RNA, 22 nt, Artificial Sequence
  LDLR targeting guide sequence portion
uggaagaugaaaggggagggga

SEQ ID NO: 10335 - RNA, 22 nt, Artificial Sequence
  LDLR targeting guide sequence portion
uggaagcacuaggugggcggac

SEQ ID NO: 10336 - RNA, 22 nt, Artificial Sequence
  LDLR targeting guide sequence portion
uggaaguggguaggggucggga

SEQ ID NO: 10337 - RNA, 22 nt, Artificial Sequence
  LDLR targeting guide sequence portion
uggacugugugcaacgcuuuuu

SEQ ID NO: 10338 - RNA, 22 nt, Artificial Sequence
  LDLR targeting guide sequence portion
uggagaccaggccugagcaaca

SEQ ID NO: 10339 - RNA, 22 nt, Artificial Sequence
  LDLR targeting guide sequence portion
uggagagaaacucaaaacuucc

SEQ ID NO: 10340 - RNA, 22 nt, Artificial Sequence
  LDLR targeting guide sequence portion
uggagagaaauggaggugucau

SEQ ID NO: 10341 - RNA, 22 nt, Artificial Sequence
  LDLR targeting guide sequence portion
uggaggaugacguggcgugaac

SEQ ID NO: 10342 - RNA, 22 nt, Artificial Sequence
  LDLR targeting guide sequence portion
uggaggcauuugcauagaagug

SEQ ID NO: 10343 - RNA, 22 nt, Artificial Sequence
  LDLR targeting guide sequence portion
uggaggugucauccuggucccc

SEQ ID NO: 10344 - RNA, 22 nt, Artificial Sequence
  LDLR targeting guide sequence portion
uggagguugcagugagccauga

SEQ ID NO: 10345 - RNA, 22 nt, Artificial Sequence
  LDLR targeting guide sequence portion
uggagucccgucccugcccaga

SEQ ID NO: 10346 - RNA, 22 nt, Artificial Sequence
  LDLR targeting guide sequence portion
uggaucguuugacgggacuuca

SEQ ID NO: 10347 - RNA, 22 nt, Artificial Sequence
  LDLR targeting guide sequence portion
uggaugaggcagggccaggggg

SEQ ID NO: 10348 - RNA, 22 nt, Artificial Sequence
  LDLR targeting guide sequence portion
uggcaauuguccccagggacaa

SEQ ID NO: 10349 - RNA, 22 nt, Artificial Sequence
  LDLR targeting guide sequence portion
uggcaccaacgggacccccugg

SEQ ID NO: 10350 - RNA, 22 nt, Artificial Sequence
  LDLR targeting guide sequence portion
uggcaccgagaccaaacucauu

SEQ ID NO: 10351 - RNA, 22 nt, Artificial Sequence
  LDLR targeting guide sequence portion
uggcaggcaaugcuuuggucuu

SEQ ID NO: 10352 - RNA, 22 nt, Artificial Sequence
  LDLR targeting guide sequence portion
uggcaguucucgauauucacga

SEQ ID NO: 10353 - RNA, 22 nt, Artificial Sequence
  LDLR targeting guide sequence portion
uggcaucauuuggugaaugagu

SEQ ID NO: 10354 - RNA, 22 nt, Artificial Sequence
  LDLR targeting guide sequence portion
uggcauuuguguuauuauuuug

SEQ ID NO: 10355 - RNA, 22 nt, Artificial Sequence
  LDLR targeting guide sequence portion
uggccaaauucauuuuuuaaga

SEQ ID NO: 10356 - RNA, 22 nt, Artificial Sequence
  LDLR targeting guide sequence portion
uggccagacacaggugccucac

SEQ ID NO: 10357 - RNA, 22 nt, Artificial Sequence
  LDLR targeting guide sequence portion
uggccagaggccaugggcugcu

SEQ ID NO: 10358 - RNA, 22 nt, Artificial Sequence
  LDLR targeting guide sequence portion
uggccaggcauggcgaggcuga

SEQ ID NO: 10359 - RNA, 22 nt, Artificial Sequence
  LDLR targeting guide sequence portion
uggcccugccucauccaccaau

SEQ ID NO: 10360 - RNA, 22 nt, Artificial Sequence
  LDLR targeting guide sequence portion
uggccgugaggacacguggccu

SEQ ID NO: 10361 - RNA, 22 nt, Artificial Sequence
  LDLR targeting guide sequence portion
uggccucuggccaggcauggcg

SEQ ID NO: 10362 - RNA, 22 nt, Artificial Sequence
  LDLR targeting guide sequence portion
uggccugcacccagguguggcu

SEQ ID NO: 10363 - RNA, 22 nt, Artificial Sequence
  LDLR targeting guide sequence portion
uggccugggaucccaucccaac

SEQ ID NO: 10364 - RNA, 22 nt, Artificial Sequence
  LDLR targeting guide sequence portion
uggcgaggcugaggugggagga

SEQ ID NO: 10365 - RNA, 22 nt, Artificial Sequence
  LDLR targeting guide sequence portion
uggcgucggaaaugaucuggcu

SEQ ID NO: 10366 - RNA, 22 nt, Artificial Sequence
  LDLR targeting guide sequence portion
uggcgugaacaucugccuggag

SEQ ID NO: 10367 - RNA, 22 nt, Artificial Sequence
  LDLR targeting guide sequence portion
uggcugaauccgugguggcacc

SEQ ID NO: 10368 - RNA, 22 nt, Artificial Sequence
  LDLR targeting guide sequence portion
uggcugucaggacaccagccug

SEQ ID NO: 10369 - RNA, 22 nt, Artificial Sequence
  LDLR targeting guide sequence portion
uggcugucuagcaaggcuugca

SEQ ID NO: 10370 - RNA, 22 nt, Artificial Sequence
  LDLR targeting guide sequence portion
uggcuuaaggaagguacaaacc

SEQ ID NO: 10371 - RNA, 22 nt, Artificial Sequence
  LDLR targeting guide sequence portion
uggcuuagagauugguggauga

SEQ ID NO: 10372 - RNA, 22 nt, Artificial Sequence
  LDLR targeting guide sequence portion
uggcuucugggagauggguguc

SEQ ID NO: 10373 - RNA, 22 nt, Artificial Sequence
  LDLR targeting guide sequence portion
uggcuuggaggcauuugcauag

SEQ ID NO: 10374 - RNA, 22 nt, Artificial Sequence
  LDLR targeting guide sequence portion
uggcuuggguugggauuuuggu

SEQ ID NO: 10375 - RNA, 22 nt, Artificial Sequence
  LDLR targeting guide sequence portion
uggcuuucaacacacaacagca

SEQ ID NO: 10376 - RNA, 22 nt, Artificial Sequence
  LDLR targeting guide sequence portion
ugggagaaugauguccccguug

SEQ ID NO: 10377 - RNA, 22 nt, Artificial Sequence
  LDLR targeting guide sequence portion
ugggagaugggugucacuuuuu

SEQ ID NO: 10378 - RNA, 22 nt, Artificial Sequence
  LDLR targeting guide sequence portion
ugggaggaugguuugagcucag

SEQ ID NO: 10379 - RNA, 22 nt, Artificial Sequence
  LDLR targeting guide sequence portion
ugggaggcagaacaggcuucgg

SEQ ID NO: 10380 - RNA, 22 nt, Artificial Sequence
  LDLR targeting guide sequence portion
ugggaggcugagcuggaucacu

SEQ ID NO: 10381 - RNA, 22 nt, Artificial Sequence
  LDLR targeting guide sequence portion
ugggaucccaggccagggaaag

SEQ ID NO: 10382 - RNA, 22 nt, Artificial Sequence
  LDLR targeting guide sequence portion
ugggaucccaucccaacacaca

SEQ ID NO: 10383 - RNA, 22 nt, Artificial Sequence
  LDLR targeting guide sequence portion
ugggaucucgcuuuguugcuca

SEQ ID NO: 10384 - RNA, 22 nt, Artificial Sequence
  LDLR targeting guide sequence portion
ugggaugggaucccaggccagg

SEQ ID NO: 10385 - RNA, 22 nt, Artificial Sequence
  LDLR targeting guide sequence portion
ugggauuuugguuucuuccuuu

SEQ ID NO: 10386 - RNA, 22 nt, Artificial Sequence
  LDLR targeting guide sequence portion
ugggcaacagaugaagacccua

SEQ ID NO: 10387 - RNA, 22 nt, Artificial Sequence
  LDLR targeting guide sequence portion
ugggcaccaggcugguguccug

SEQ ID NO: 10388 - RNA, 22 nt, Artificial Sequence
  LDLR targeting guide sequence portion
ugggcacuguccgaagccuguu

SEQ ID NO: 10389 - RNA, 22 nt, Artificial Sequence
  LDLR targeting guide sequence portion
ugggcagggacgggacuccagg

SEQ ID NO: 10390 - RNA, 22 nt, Artificial Sequence
  LDLR targeting guide sequence portion
ugggccugacauccccuccccu

SEQ ID NO: 10391 - RNA, 22 nt, Artificial Sequence
  LDLR targeting guide sequence portion
ugggcggacauaaagacgacaa

SEQ ID NO: 10392 - RNA, 22 nt, Artificial Sequence
  LDLR targeting guide sequence portion
ugggcugcugaugcaccaugca

SEQ ID NO: 10393 - RNA, 22 nt, Artificial Sequence
  LDLR targeting guide sequence portion
uggggaagugaauggcuuggag

SEQ ID NO: 10394 - RNA, 22 nt, Artificial Sequence
  LDLR targeting guide sequence portion
uggggacaauugccaaucccuu

SEQ ID NO: 10395 - RNA, 22 nt, Artificial Sequence
  LDLR targeting guide sequence portion
uggggauuuuuuguuauguuug

SEQ ID NO: 10396 - RNA, 22 nt, Artificial Sequence
  LDLR targeting guide sequence portion
uggguacgguggcacgugccug

SEQ ID NO: 10397 - RNA, 22 nt, Artificial Sequence
  LDLR targeting guide sequence portion
uggguaggggucgggaggaugg

SEQ ID NO: 10398 - RNA, 22 nt, Artificial Sequence
  LDLR targeting guide sequence portion
uggguauguguuuaaaacaugc

SEQ ID NO: 10399 - RNA, 22 nt, Artificial Sequence
  LDLR targeting guide sequence portion
ugggucaugauucgggggugac

SEQ ID NO: 10400 - RNA, 22 nt, Artificial Sequence
  LDLR targeting guide sequence portion
ugggugcaggccacguguccuc

SEQ ID NO: 10401 - RNA, 22 nt, Artificial Sequence
  LDLR targeting guide sequence portion
ugggugggucaugauucggggg

SEQ ID NO: 10402 - RNA, 22 nt, Artificial Sequence
  LDLR targeting guide sequence portion
ugggugucacuuuuuaaaccac

SEQ ID NO: 10403 - RNA, 22 nt, Artificial Sequence
  LDLR targeting guide sequence portion
uggguugggauuuugguuucuu

SEQ ID NO: 10404 - RNA, 22 nt, Artificial Sequence
  LDLR targeting guide sequence portion
uggguuuguaccuuccuuaagc

SEQ ID NO: 10405 - RNA, 22 nt, Artificial Sequence
  LDLR targeting guide sequence portion
uggucacccuuaauauuuauua

SEQ ID NO: 10406 - RNA, 22 nt, Artificial Sequence
  LDLR targeting guide sequence portion
uggucagucuggaggaugacgu

SEQ ID NO: 10407 - RNA, 22 nt, Artificial Sequence
  LDLR targeting guide sequence portion
ugguccccccgggccuguuucu

SEQ ID NO: 10408 - RNA, 22 nt, Artificial Sequence
  LDLR targeting guide sequence portion
uggucuccuugcacuuucucag

SEQ ID NO: 10409 - RNA, 22 nt, Artificial Sequence
  LDLR targeting guide sequence portion
uggucucggugccaccacggau

SEQ ID NO: 10410 - RNA, 22 nt, Artificial Sequence
  LDLR targeting guide sequence portion
uggucuucucugucuuugaaua

SEQ ID NO: 10411 - RNA, 22 nt, Artificial Sequence
  LDLR targeting guide sequence portion
uggugaaugaguuuggucucgg

SEQ ID NO: 10412 - RNA, 22 nt, Artificial Sequence
  LDLR targeting guide sequence portion
uggugcaucagcagcccauggc

SEQ ID NO: 10413 - RNA, 22 nt, Artificial Sequence
  LDLR targeting guide sequence portion
uggugccaucugcuguugugug

SEQ ID NO: 10414 - RNA, 22 nt, Artificial Sequence
  LDLR targeting guide sequence portion
uggugcccauccucccgacccc

SEQ ID NO: 10415 - RNA, 22 nt, Artificial Sequence
  LDLR targeting guide sequence portion
ugguggaugaggcagggccagg

SEQ ID NO: 10416 - RNA, 22 nt, Artificial Sequence
  LDLR targeting guide sequence portion
ugguggcaccgagaccaaacuc

SEQ ID NO: 10417 - RNA, 22 nt, Artificial Sequence
  LDLR targeting guide sequence portion
ugguguccugacagccacaccu

SEQ ID NO: 10418 - RNA, 22 nt, Artificial Sequence
  LDLR targeting guide sequence portion
ugguugcuguauuuguucagug

SEQ ID NO: 10419 - RNA, 22 nt, Artificial Sequence
  LDLR targeting guide sequence portion
ugguuuaaaaagugacacccau

SEQ ID NO: 10420 - RNA, 22 nt, Artificial Sequence
  LDLR targeting guide sequence portion
ugguuucggagcacguaaaugc

SEQ ID NO: 10421 - RNA, 22 nt, Artificial Sequence
  LDLR targeting guide sequence portion
ugguuucuuccuuuccucguga

SEQ ID NO: 10422 - RNA, 22 nt, Artificial Sequence
  LDLR targeting guide sequence portion
ugguuugagcucaggcauuuga

SEQ ID NO: 10423 - RNA, 22 nt, Artificial Sequence
  LDLR targeting guide sequence portion
ugguuuuuguagagaugggauc

SEQ ID NO: 10424 - RNA, 22 nt, Artificial Sequence
  LDLR targeting guide sequence portion
uguacaaagauuauuugcacga

SEQ ID NO: 10425 - RNA, 22 nt, Artificial Sequence
  LDLR targeting guide sequence portion
uguacaacucugaacugagaaa

SEQ ID NO: 10426 - RNA, 22 nt, Artificial Sequence
  LDLR targeting guide sequence portion
uguacacaguguacaacucuga

SEQ ID NO: 10427 - RNA, 22 nt, Artificial Sequence
  LDLR targeting guide sequence portion
uguacacuguguacauuuggca

SEQ ID NO: 10428 - RNA, 22 nt, Artificial Sequence
  LDLR targeting guide sequence portion
uguacagauaguggggauuuuu

SEQ ID NO: 10429 - RNA, 22 nt, Artificial Sequence
  LDLR targeting guide sequence portion
uguacagggacgcauuuacgug

SEQ ID NO: 10430 - RNA, 22 nt, Artificial Sequence
  LDLR targeting guide sequence portion
uguacauaaagaagaggcauuu

SEQ ID NO: 10431 - RNA, 22 nt, Artificial Sequence
  LDLR targeting guide sequence portion
uguaccuuccuuaagccaggaa

SEQ ID NO: 10432 - RNA, 22 nt, Artificial Sequence
  LDLR targeting guide sequence portion
uguagccugaaugucuuacugu

SEQ ID NO: 10433 - RNA, 22 nt, Artificial Sequence
  LDLR targeting guide sequence portion
uguaggggguuauugccucuga

SEQ ID NO: 10434 - RNA, 22 nt, Artificial Sequence
  LDLR targeting guide sequence portion
uguauagaagguuuuuguagcc

SEQ ID NO: 10435 - RNA, 22 nt, Artificial Sequence
  LDLR targeting guide sequence portion
uguaugaguggcuucugggaga

SEQ ID NO: 10436 - RNA, 22 nt, Artificial Sequence
  LDLR targeting guide sequence portion
uguauguaugaguggcuucugg

SEQ ID NO: 10437 - RNA, 22 nt, Artificial Sequence
  LDLR targeting guide sequence portion
uguauuucugaaauagggucuu

SEQ ID NO: 10438 - RNA, 22 nt, Artificial Sequence
  LDLR targeting guide sequence portion
uguauuuguucagugacuauuc

SEQ ID NO: 10439 - RNA, 22 nt, Artificial Sequence
  LDLR targeting guide sequence portion
ugucaaugaaugccggggacag

SEQ ID NO: 10440 - RNA, 22 nt, Artificial Sequence
  LDLR targeting guide sequence portion
ugucacaagggauuggcaauug

SEQ ID NO: 10441 - RNA, 22 nt, Artificial Sequence
  LDLR targeting guide sequence portion
ugucacccccgaaucaugaccc

SEQ ID NO: 10442 - RNA, 22 nt, Artificial Sequence
  LDLR targeting guide sequence portion
ugucacgguggagagaaacuca

SEQ ID NO: 10443 - RNA, 22 nt, Artificial Sequence
  LDLR targeting guide sequence portion
ugucacugucucuccggacauc

SEQ ID NO: 10444 - RNA, 22 nt, Artificial Sequence
  LDLR targeting guide sequence portion
ugucacuuuuuaaaccacugua

SEQ ID NO: 10445 - RNA, 22 nt, Artificial Sequence
  LDLR targeting guide sequence portion
ugucaggacaccagccuggugc

SEQ ID NO: 10446 - RNA, 22 nt, Artificial Sequence
  LDLR targeting guide sequence portion
ugucaggcccagagaagcaagu

SEQ ID NO: 10447 - RNA, 22 nt, Artificial Sequence
  LDLR targeting guide sequence portion
ugucauccugguccccccgggc

SEQ ID NO: 10448 - RNA, 22 nt, Artificial Sequence
  LDLR targeting guide sequence portion
uguccccagggacaaaacacug

SEQ ID NO: 10449 - RNA, 22 nt, Artificial Sequence
  LDLR targeting guide sequence portion
uguccccggcauucauugacac

SEQ ID NO: 10450 - RNA, 22 nt, Artificial Sequence
  LDLR targeting guide sequence portion
uguccccguuguauguaugagu

SEQ ID NO: 10451 - RNA, 22 nt, Artificial Sequence
  LDLR targeting guide sequence portion
ugucccuggggacaauugccaa

SEQ ID NO: 10452 - RNA, 22 nt, Artificial Sequence
  LDLR targeting guide sequence portion
uguccgaagccuguucugccuc

SEQ ID NO: 10453 - RNA, 22 nt, Artificial Sequence
  LDLR targeting guide sequence portion
uguccgcccaccuagugcuucc

SEQ ID NO: 10454 - RNA, 22 nt, Artificial Sequence
  LDLR targeting guide sequence portion
uguccggagagacagugacagc

SEQ ID NO: 10455 - RNA, 22 nt, Artificial Sequence
  LDLR targeting guide sequence portion
uguccucacggccaagguaacc

SEQ ID NO: 10456 - RNA, 22 nt, Artificial Sequence
  LDLR targeting guide sequence portion
uguccugacagccacaccuggg

SEQ ID NO: 10457 - RNA, 22 nt, Artificial Sequence
  LDLR targeting guide sequence portion
ugucgucuuuauguccgcccac

SEQ ID NO: 10458 - RNA, 22 nt, Artificial Sequence
  LDLR targeting guide sequence portion
ugucgugagcuaugauuaugcc

SEQ ID NO: 10459 - RNA, 22 nt, Artificial Sequence
  LDLR targeting guide sequence portion
ugucguguguguugggauggga

SEQ ID NO: 10460 - RNA, 22 nt, Artificial Sequence
  LDLR targeting guide sequence portion
ugucguugauggguauguguuu

SEQ ID NO: 10461 - RNA, 22 nt, Artificial Sequence
  LDLR targeting guide sequence portion
ugucuagcaaggcuugcauaga

SEQ ID NO: 10462 - RNA, 22 nt, Artificial Sequence
  LDLR targeting guide sequence portion
ugucucaggcacuuaauaaaua

SEQ ID NO: 10463 - RNA, 22 nt, Artificial Sequence
  LDLR targeting guide sequence portion
ugucucuccggacaucagugca

SEQ ID NO: 10464 - RNA, 22 nt, Artificial Sequence
  LDLR targeting guide sequence portion
ugucuuucgagguggguuugua

SEQ ID NO: 10465 - RNA, 22 nt, Artificial Sequence
  LDLR targeting guide sequence portion
ugucuuugaauaaaacaaggcc

SEQ ID NO: 10466 - RNA, 22 nt, Artificial Sequence
  LDLR targeting guide sequence portion
ugugacaucuucacgcgggagu

SEQ ID NO: 10467 - RNA, 22 nt, Artificial Sequence
  LDLR targeting guide sequence portion
ugugcaacgcuuuuugggagaa

SEQ ID NO: 10468 - RNA, 22 nt, Artificial Sequence
  LDLR targeting guide sequence portion
uguggcugucaggacaccagcc

SEQ ID NO: 10469 - RNA, 22 nt, Artificial Sequence
  LDLR targeting guide sequence portion
uguguaggggguuauugccucu

SEQ ID NO: 10470 - RNA, 22 nt, Artificial Sequence
  LDLR targeting guide sequence portion
ugugucacgguggagagaaacu

SEQ ID NO: 10471 - RNA, 22 nt, Artificial Sequence
  LDLR targeting guide sequence portion
ugugucuggccaaauucauuuu

SEQ ID NO: 10472 - RNA, 22 nt, Artificial Sequence
  LDLR targeting guide sequence portion
ugugugcaacgcuuuuugggag

SEQ ID NO: 10473 - RNA, 22 nt, Artificial Sequence
  LDLR targeting guide sequence portion
uguguguugaaagccacuugcu

SEQ ID NO: 10474 - RNA, 22 nt, Artificial Sequence
  LDLR targeting guide sequence portion
uguguguugggaugggauccca

SEQ ID NO: 10475 - RNA, 22 nt, Artificial Sequence
  LDLR targeting guide sequence portion
uguguugaaagccacuugcuuc

SEQ ID NO: 10476 - RNA, 22 nt, Artificial Sequence
  LDLR targeting guide sequence portion
uguguugggaugggaucccagg

SEQ ID NO: 10477 - RNA, 22 nt, Artificial Sequence
  LDLR targeting guide sequence portion
uguguuuaaaacaugcacggug

SEQ ID NO: 10478 - RNA, 22 nt, Artificial Sequence
  LDLR targeting guide sequence portion
uguuacuguugcacugaugucc

SEQ ID NO: 10479 - RNA, 22 nt, Artificial Sequence
  LDLR targeting guide sequence portion
uguuauuauuuugcacuguuuu

SEQ ID NO: 10480 - RNA, 22 nt, Artificial Sequence
  LDLR targeting guide sequence portion
uguucacgccacgucauccucc

SEQ ID NO: 10481 - RNA, 22 nt, Artificial Sequence
  LDLR targeting guide sequence portion
uguucagugacuauucucgggg

SEQ ID NO: 10482 - RNA, 22 nt, Artificial Sequence
  LDLR targeting guide sequence portion
uguucugccucccagaugaaua

SEQ ID NO: 10483 - RNA, 22 nt, Artificial Sequence
  LDLR targeting guide sequence portion
uguugaaagccacuugcuucuc

SEQ ID NO: 10484 - RNA, 22 nt, Artificial Sequence
  LDLR targeting guide sequence portion
uguugcacugauguccggagag

SEQ ID NO: 10485 - RNA, 22 nt, Artificial Sequence
  LDLR targeting guide sequence portion
uguugcucaggccuggucucca

SEQ ID NO: 10486 - RNA, 22 nt, Artificial Sequence
  LDLR targeting guide sequence portion
uguugggaugggaucccaggcc

SEQ ID NO: 10487 - RNA, 22 nt, Artificial Sequence
  LDLR targeting guide sequence portion
uguuguguguugaaagccacuu

SEQ ID NO: 10488 - RNA, 22 nt, Artificial Sequence
  LDLR targeting guide sequence portion
uguuuaaaacaugcacggugag

SEQ ID NO: 10489 - RNA, 22 nt, Artificial Sequence
  LDLR targeting guide sequence portion
uguuuaccucuucuaugcaagc

SEQ ID NO: 10490 - RNA, 22 nt, Artificial Sequence
  LDLR targeting guide sequence portion
uguuucucuuauccuucacgag

SEQ ID NO: 10491 - RNA, 22 nt, Artificial Sequence
  LDLR targeting guide sequence portion
uguuugaggauugugucacggu

SEQ ID NO: 10492 - RNA, 22 nt, Artificial Sequence
  LDLR targeting guide sequence portion
uguuugcacuuuguauauuggu

SEQ ID NO: 10493 - RNA, 22 nt, Artificial Sequence
  LDLR targeting guide sequence portion
uguuuuaaacacauacccauca

SEQ ID NO: 10494 - RNA, 22 nt, Artificial Sequence
  LDLR targeting guide sequence portion
uguuuuauucaaagacagagaa

SEQ ID NO: 10495 - RNA, 22 nt, Artificial Sequence
  LDLR targeting guide sequence portion
uguuuucugucguguguguugg

SEQ ID NO: 10496 - RNA, 22 nt, Artificial Sequence
  LDLR targeting guide sequence portion
uguuuugucccuggggacaauu

SEQ ID NO: 10497 - RNA, 22 nt, Artificial Sequence
  LDLR targeting guide sequence portion
uuaaaaaaugaauuuggccaga

SEQ ID NO: 10498 - RNA, 22 nt, Artificial Sequence
  LDLR targeting guide sequence portion
uuaaaaagugacacccaucucc

SEQ ID NO: 10499 - RNA, 22 nt, Artificial Sequence
  LDLR targeting guide sequence portion
uuaaaaaucagcuggguacggu

SEQ ID NO: 10500 - RNA, 22 nt, Artificial Sequence
  LDLR targeting guide sequence portion
uuaaaacaugcacggugaggcc

SEQ ID NO: 10501 - RNA, 22 nt, Artificial Sequence
  LDLR targeting guide sequence portion
uuaaacacauacccaucaacga

SEQ ID NO: 10502 - RNA, 22 nt, Artificial Sequence
  LDLR targeting guide sequence portion
uuaacuuuuugguuuuuguaga

SEQ ID NO: 10503 - RNA, 22 nt, Artificial Sequence
  LDLR targeting guide sequence portion
uuaagccaggaaagggauucau

SEQ ID NO: 10504 - RNA, 22 nt, Artificial Sequence
  LDLR targeting guide sequence portion
uuaaggaagguacaaacccacc

SEQ ID NO: 10505 - RNA, 22 nt, Artificial Sequence
  LDLR targeting guide sequence portion
uuaagggugaccagugacucag

SEQ ID NO: 10506 - RNA, 22 nt, Artificial Sequence
  LDLR targeting guide sequence portion
uuaagugccugagacacccggu

SEQ ID NO: 10507 - RNA, 22 nt, Artificial Sequence
  LDLR targeting guide sequence portion
uuaauaaauauuaagggugacc

SEQ ID NO: 10508 - RNA, 22 nt, Artificial Sequence
  LDLR targeting guide sequence portion
uuaauauuuauuaagugccuga

SEQ ID NO: 10509 - RNA, 22 nt, Artificial Sequence
  LDLR targeting guide sequence portion
uuaauugaucacaguaagacau

SEQ ID NO: 10510 - RNA, 22 nt, Artificial Sequence
  LDLR targeting guide sequence portion
uuacaggcgugaggcaccugug

SEQ ID NO: 10511 - RNA, 22 nt, Artificial Sequence
  LDLR targeting guide sequence portion
uuaccucuucuaugcaagccuu

SEQ ID NO: 10512 - RNA, 22 nt, Artificial Sequence
  LDLR targeting guide sequence portion
uuaccuuggccgugaggacacg

SEQ ID NO: 10513 - RNA, 22 nt, Artificial Sequence
  LDLR targeting guide sequence portion
uuacgugcuccgaaaccagaaa

SEQ ID NO: 10514 - RNA, 22 nt, Artificial Sequence
  LDLR targeting guide sequence portion
uuacuauguugcccaggcugga

SEQ ID NO: 10515 - RNA, 22 nt, Artificial Sequence
  LDLR targeting guide sequence portion
uuacuguugcacugauguccgg

SEQ ID NO: 10516 - RNA, 22 nt, Artificial Sequence
  LDLR targeting guide sequence portion
uuagagauugguggaugaggca

SEQ ID NO: 10517 - RNA, 22 nt, Artificial Sequence
  LDLR targeting guide sequence portion
uuagccuuugcccugucacccc

SEQ ID NO: 10518 - RNA, 22 nt, Artificial Sequence
  LDLR targeting guide sequence portion
uuagggguuuggcuuagagauu

SEQ ID NO: 10519 - RNA, 22 nt, Artificial Sequence
  LDLR targeting guide sequence portion
uuauauauuuauucaucuggga

SEQ ID NO: 10520 - RNA, 22 nt, Artificial Sequence
  LDLR targeting guide sequence portion
uuauccuucacgaggaaaggaa

SEQ ID NO: 10521 - RNA, 22 nt, Artificial Sequence
  LDLR targeting guide sequence portion
uuaugccacugcuuuccagccu

SEQ ID NO: 10522 - RNA, 22 nt, Artificial Sequence
  LDLR targeting guide sequence portion
uuauguccgcccaccuagugcu

SEQ ID NO: 10523 - RNA, 22 nt, Artificial Sequence
  LDLR targeting guide sequence portion
uuauuaagugccugagacaccc

SEQ ID NO: 10524 - RNA, 22 nt, Artificial Sequence
  LDLR targeting guide sequence portion
uuauuauuuugcacuguuuucu

SEQ ID NO: 10525 - RNA, 22 nt, Artificial Sequence
  LDLR targeting guide sequence portion
uuauucaaagacagagaagacc

SEQ ID NO: 10526 - RNA, 22 nt, Artificial Sequence
  LDLR targeting guide sequence portion
uuauucaucugggaggcagaac

SEQ ID NO: 10527 - RNA, 22 nt, Artificial Sequence
  LDLR targeting guide sequence portion
uuauugccucugaaaugccucu

SEQ ID NO: 10528 - RNA, 22 nt, Artificial Sequence
  LDLR targeting guide sequence portion
uuauuugcacgaacuggacugu

SEQ ID NO: 10529 - RNA, 22 nt, Artificial Sequence
  LDLR targeting guide sequence portion
uuauuuugcacuguuuucuguc

SEQ ID NO: 10530 - RNA, 22 nt, Artificial Sequence
  LDLR targeting guide sequence portion
uuauuuuugcaaacccugguug

SEQ ID NO: 10531 - RNA, 22 nt, Artificial Sequence
  LDLR targeting guide sequence portion
uucaaagacagagaagaccaaa

SEQ ID NO: 10532 - RNA, 22 nt, Artificial Sequence
  LDLR targeting guide sequence portion
uucaaagccgugaucgugaaua

SEQ ID NO: 10533 - RNA, 22 nt, Artificial Sequence
  LDLR targeting guide sequence portion
uucaacacacaacagcagaugg

SEQ ID NO: 10534 - RNA, 22 nt, Artificial Sequence
  LDLR targeting guide sequence portion
uucaccaaaugaugccacuucc

SEQ ID NO: 10535 - RNA, 22 nt, Artificial Sequence
  LDLR targeting guide sequence portion
uucacgaggaaaggaagaaacc

SEQ ID NO: 10536 - RNA, 22 nt, Artificial Sequence
  LDLR targeting guide sequence portion
uucacgaucacggcuuugaagu

SEQ ID NO: 10537 - RNA, 22 nt, Artificial Sequence
  LDLR targeting guide sequence portion
uucacgccacgucauccuccag

SEQ ID NO: 10538 - RNA, 22 nt, Artificial Sequence
  LDLR targeting guide sequence portion
uucacgcgggagucugacggag

SEQ ID NO: 10539 - RNA, 22 nt, Artificial Sequence
  LDLR targeting guide sequence portion
uucacuuccccaaucuugucgu

SEQ ID NO: 10540 - RNA, 22 nt, Artificial Sequence
  LDLR targeting guide sequence portion
uucagaaagaaccugaaguccc

SEQ ID NO: 10541 - RNA, 22 nt, Artificial Sequence
  LDLR targeting guide sequence portion
uucagaggcaauaacccccuac

SEQ ID NO: 10542 - RNA, 22 nt, Artificial Sequence
  LDLR targeting guide sequence portion
uucagaguuguacacuguguac

SEQ ID NO: 10543 - RNA, 22 nt, Artificial Sequence
  LDLR targeting guide sequence portion
uucagccagaucauuuccgacg

SEQ ID NO: 10544 - RNA, 22 nt, Artificial Sequence
  LDLR targeting guide sequence portion
uucaggaguuggagaccaggcc

SEQ ID NO: 10545 - RNA, 22 nt, Artificial Sequence
  LDLR targeting guide sequence portion
uucaggcuacaaaaaccuucua

SEQ ID NO: 10546 - RNA, 22 nt, Artificial Sequence
  LDLR targeting guide sequence portion
uucagguucuuucugaaaucgc

SEQ ID NO: 10547 - RNA, 22 nt, Artificial Sequence
  LDLR targeting guide sequence portion
uucagugacuauucucggggcc

SEQ ID NO: 10548 - RNA, 22 nt, Artificial Sequence
  LDLR targeting guide sequence portion
uucaucugggaggcagaacagg

SEQ ID NO: 10549 - RNA, 22 nt, Artificial Sequence
  LDLR targeting guide sequence portion
uucaucuuccauguuugaggau

SEQ ID NO: 10550 - RNA, 22 nt, Artificial Sequence
  LDLR targeting guide sequence portion
uucauggcgucggaaaugaucu

SEQ ID NO: 10551 - RNA, 22 nt, Artificial Sequence
  LDLR targeting guide sequence portion
uucauugacacgggcuuucccu

SEQ ID NO: 10552 - RNA, 22 nt, Artificial Sequence
  LDLR targeting guide sequence portion
uucauuuuuuaagagauggggu

SEQ ID NO: 10553 - RNA, 22 nt, Artificial Sequence
  LDLR targeting guide sequence portion
uuccacuucuaugcaaaugccu

SEQ ID NO: 10554 - RNA, 22 nt, Artificial Sequence
  LDLR targeting guide sequence portion
uuccauguuugaggauuguguc

SEQ ID NO: 10555 - RNA, 22 nt, Artificial Sequence
  LDLR targeting guide sequence portion
uuccauucccguggucuccuug

SEQ ID NO: 10556 - RNA, 22 nt, Artificial Sequence
  LDLR targeting guide sequence portion
uucccagaggcagagccugagu

SEQ ID NO: 10557 - RNA, 22 nt, Artificial Sequence
  LDLR targeting guide sequence portion
uuccccaaucuugucguugaug

SEQ ID NO: 10558 - RNA, 22 nt, Artificial Sequence
  LDLR targeting guide sequence portion
uucccguggucuccuugcacuu

SEQ ID NO: 10559 - RNA, 22 nt, Artificial Sequence
  LDLR targeting guide sequence portion
uucccuggccugggaucccauc

SEQ ID NO: 10560 - RNA, 22 nt, Artificial Sequence
  LDLR targeting guide sequence portion
uuccgacgccaugaaucccuuu

SEQ ID NO: 10561 - RNA, 22 nt, Artificial Sequence
  LDLR targeting guide sequence portion
uuccucgugaaggauaagagaa

SEQ ID NO: 10562 - RNA, 22 nt, Artificial Sequence
  LDLR targeting guide sequence portion
uuccugagaccucgccggccuu

SEQ ID NO: 10563 - RNA, 22 nt, Artificial Sequence
  LDLR targeting guide sequence portion
uuccuggagagaaauggaggug

SEQ ID NO: 10564 - RNA, 22 nt, Artificial Sequence
  LDLR targeting guide sequence portion
uuccuggcuuaaggaagguaca

SEQ ID NO: 10565 - RNA, 22 nt, Artificial Sequence
  LDLR targeting guide sequence portion
uuccuuaagccaggaaagggau

SEQ ID NO: 10566 - RNA, 22 nt, Artificial Sequence
  LDLR targeting guide sequence portion
uuccuuuccucgugaaggauaa

SEQ ID NO: 10567 - RNA, 22 nt, Artificial Sequence
  LDLR targeting guide sequence portion
uucgagguggguuuguaccuuc

SEQ ID NO: 10568 - RNA, 22 nt, Artificial Sequence
  LDLR targeting guide sequence portion
uucggacagugcccaugcaaug

SEQ ID NO: 10569 - RNA, 22 nt, Artificial Sequence
  LDLR targeting guide sequence portion
uucggagcacguaaaugcgucc

SEQ ID NO: 10570 - RNA, 22 nt, Artificial Sequence
  LDLR targeting guide sequence portion
uucgggggugacagggcaaagg

SEQ ID NO: 10571 - RNA, 22 nt, Artificial Sequence
  LDLR targeting guide sequence portion
uucuauacagugguuuaaaaag

SEQ ID NO: 10572 - RNA, 22 nt, Artificial Sequence
  LDLR targeting guide sequence portion
uucuaugcaaaugccuccaagc

SEQ ID NO: 10573 - RNA, 22 nt, Artificial Sequence
  LDLR targeting guide sequence portion
uucuaugcaagccuugcuagac

SEQ ID NO: 10574 - RNA, 22 nt, Artificial Sequence
  LDLR targeting guide sequence portion
uucucaguucagaguuguacac

SEQ ID NO: 10575 - RNA, 22 nt, Artificial Sequence
  LDLR targeting guide sequence portion
uucucccaaaaagcguugcaca

SEQ ID NO: 10576 - RNA, 22 nt, Artificial Sequence
  LDLR targeting guide sequence portion
uucucgauauucacgaucacgg

SEQ ID NO: 10577 - RNA, 22 nt, Artificial Sequence
  LDLR targeting guide sequence portion
uucucggggcccuguguagggg

SEQ ID NO: 10578 - RNA, 22 nt, Artificial Sequence
  LDLR targeting guide sequence portion
uucucuccaccgugacacaauc

SEQ ID NO: 10579 - RNA, 22 nt, Artificial Sequence
  LDLR targeting guide sequence portion
uucucuccaggaaguuuugagu

SEQ ID NO: 10580 - RNA, 22 nt, Artificial Sequence
  LDLR targeting guide sequence portion
uucucugggccugacauccccu

SEQ ID NO: 10581 - RNA, 22 nt, Artificial Sequence
  LDLR targeting guide sequence portion
uucucugucuuugaauaaaaca

SEQ ID NO: 10582 - RNA, 22 nt, Artificial Sequence
  LDLR targeting guide sequence portion
uucucuuauccuucacgaggaa

SEQ ID NO: 10583 - RNA, 22 nt, Artificial Sequence
  LDLR targeting guide sequence portion
uucugaaauagggucuucaucu

SEQ ID NO: 10584 - RNA, 22 nt, Artificial Sequence
  LDLR targeting guide sequence portion
uucugaaaucgccguguuacug

SEQ ID NO: 10585 - RNA, 22 nt, Artificial Sequence
  LDLR targeting guide sequence portion
uucugccucccagaugaauaaa

SEQ ID NO: 10586 - RNA, 22 nt, Artificial Sequence
  LDLR targeting guide sequence portion
uucugggagaugggugucacuu

SEQ ID NO: 10587 - RNA, 22 nt, Artificial Sequence
  LDLR targeting guide sequence portion
uucugggcagggacgggacucc

SEQ ID NO: 10588 - RNA, 22 nt, Artificial Sequence
  LDLR targeting guide sequence portion
uucugguuucggagcacguaaa

SEQ ID NO: 10589 - RNA, 22 nt, Artificial Sequence
  LDLR targeting guide sequence portion
uucugucguguguguugggaug

SEQ ID NO: 10590 - RNA, 22 nt, Artificial Sequence
  LDLR targeting guide sequence portion
uucuuccuuuccucgugaagga

SEQ ID NO: 10591 - RNA, 22 nt, Artificial Sequence
  LDLR targeting guide sequence portion
uucuuucugaaaucgccguguu

SEQ ID NO: 10592 - RNA, 22 nt, Artificial Sequence
  LDLR targeting guide sequence portion
uugaaagccacuugcuucucug

SEQ ID NO: 10593 - RNA, 22 nt, Artificial Sequence
  LDLR targeting guide sequence portion
uugaagucccggucaaccugcc

SEQ ID NO: 10594 - RNA, 22 nt, Artificial Sequence
  LDLR targeting guide sequence portion
uugaauaaaacaaggccggcga

SEQ ID NO: 10595 - RNA, 22 nt, Artificial Sequence
  LDLR targeting guide sequence portion
uugacacgggcuuucccuggcc

SEQ ID NO: 10596 - RNA, 22 nt, Artificial Sequence
  LDLR targeting guide sequence portion
uugaccgggacuucaaagccgu

SEQ ID NO: 10597 - RNA, 22 nt, Artificial Sequence
  LDLR targeting guide sequence portion
uugacgggacuucagguucuuu

SEQ ID NO: 10598 - RNA, 22 nt, Artificial Sequence
  LDLR targeting guide sequence portion
uugacuccugaguuuagggguu

SEQ ID NO: 10599 - RNA, 22 nt, Artificial Sequence
  LDLR targeting guide sequence portion
uugagcucaggcauuugaggcu

SEQ ID NO: 10600 - RNA, 22 nt, Artificial Sequence
  LDLR targeting guide sequence portion
uugaggauugugucacggugga

SEQ ID NO: 10601 - RNA, 22 nt, Artificial Sequence
  LDLR targeting guide sequence portion
uugaggcugucgugagcuauga

SEQ ID NO: 10602 - RNA, 22 nt, Artificial Sequence
  LDLR targeting guide sequence portion
uugaguucaggaguuggagacc

SEQ ID NO: 10603 - RNA, 22 nt, Artificial Sequence
  LDLR targeting guide sequence portion
uugaguuucucuccaccgugac

SEQ ID NO: 10604 - RNA, 22 nt, Artificial Sequence
  LDLR targeting guide sequence portion
uugaucacaguaagacauucag

SEQ ID NO: 10605 - RNA, 22 nt, Artificial Sequence
  LDLR targeting guide sequence portion
uugauggguauguguuuaaaac

SEQ ID NO: 10606 - RNA, 22 nt, Artificial Sequence
  LDLR targeting guide sequence portion
uugcaaacccugguugcuguau

SEQ ID NO: 10607 - RNA, 22 nt, Artificial Sequence
  LDLR targeting guide sequence portion
uugcacacaguccaguucgugc

SEQ ID NO: 10608 - RNA, 22 nt, Artificial Sequence
  LDLR targeting guide sequence portion
uugcacgaacuggacugugugc

SEQ ID NO: 10609 - RNA, 22 nt, Artificial Sequence
  LDLR targeting guide sequence portion
uugcacugauguccggagagac

SEQ ID NO: 10610 - RNA, 22 nt, Artificial Sequence
  LDLR targeting guide sequence portion
uugcacuguuuucugucgugug

SEQ ID NO: 10611 - RNA, 22 nt, Artificial Sequence
  LDLR targeting guide sequence portion
uugcacuuucucaguucagagu

SEQ ID NO: 10612 - RNA, 22 nt, Artificial Sequence
  LDLR targeting guide sequence portion
uugcacuuuguauauugguuga

SEQ ID NO: 10613 - RNA, 22 nt, Artificial Sequence
  LDLR targeting guide sequence portion
uugcauagaagagguaaacacg

SEQ ID NO: 10614 - RNA, 22 nt, Artificial Sequence
  LDLR targeting guide sequence portion
uugcauagaaguggaagcacua

SEQ ID NO: 10615 - RNA, 22 nt, Artificial Sequence
  LDLR targeting guide sequence portion
uugcaugggcacuguccgaagc

SEQ ID NO: 10616 - RNA, 22 nt, Artificial Sequence
  LDLR targeting guide sequence portion
uugccaaucccuugugacaucu

SEQ ID NO: 10617 - RNA, 22 nt, Artificial Sequence
  LDLR targeting guide sequence portion
uugcccaggcuggaaagcagug

SEQ ID NO: 10618 - RNA, 22 nt, Artificial Sequence
  LDLR targeting guide sequence portion
uugcccugucacccccgaauca

SEQ ID NO: 10619 - RNA, 22 nt, Artificial Sequence
  LDLR targeting guide sequence portion
uugccucugaaaugccucuucu

SEQ ID NO: 10620 - RNA, 22 nt, Artificial Sequence
  LDLR targeting guide sequence portion
uugccugccagagcuuuguuuu

SEQ ID NO: 10621 - RNA, 22 nt, Artificial Sequence
  LDLR targeting guide sequence portion
uugcuagacagccagguuagcc

SEQ ID NO: 10622 - RNA, 22 nt, Artificial Sequence
  LDLR targeting guide sequence portion
uugcucaggccuggucuccaac

SEQ ID NO: 10623 - RNA, 22 nt, Artificial Sequence
  LDLR targeting guide sequence portion
uugcuguauuuguucagugacu

SEQ ID NO: 10624 - RNA, 22 nt, Artificial Sequence
  LDLR targeting guide sequence portion
uugcuucucugggccugacauc

SEQ ID NO: 10625 - RNA, 22 nt, Artificial Sequence
  LDLR targeting guide sequence portion
uuggagaccaggccugagcaac

SEQ ID NO: 10626 - RNA, 22 nt, Artificial Sequence
  LDLR targeting guide sequence portion
uuggaggcauuugcauagaagu

SEQ ID NO: 10627 - RNA, 22 nt, Artificial Sequence
  LDLR targeting guide sequence portion
uuggcaauuguccccagggaca

SEQ ID NO: 10628 - RNA, 22 nt, Artificial Sequence
  LDLR targeting guide sequence portion
uuggcauuuguguuauuauuuu

SEQ ID NO: 10629 - RNA, 22 nt, Artificial Sequence
  LDLR targeting guide sequence portion
uuggccagacacaggugccuca

SEQ ID NO: 10630 - RNA, 22 nt, Artificial Sequence
  LDLR targeting guide sequence portion
uuggccgugaggacacguggcc

SEQ ID NO: 10631 - RNA, 22 nt, Artificial Sequence
  LDLR targeting guide sequence portion
uuggcuuagagauugguggaug

SEQ ID NO: 10632 - RNA, 22 nt, Artificial Sequence
  LDLR targeting guide sequence portion
uugggagaaugauguccccguu

SEQ ID NO: 10633 - RNA, 22 nt, Artificial Sequence
  LDLR targeting guide sequence portion
uugggaggcugagcuggaucac

SEQ ID NO: 10634 - RNA, 22 nt, Artificial Sequence
  LDLR targeting guide sequence portion
uugggaugggaucccaggccag

SEQ ID NO: 10635 - RNA, 22 nt, Artificial Sequence
  LDLR targeting guide sequence portion
uugggauuuugguuucuuccuu

SEQ ID NO: 10636 - RNA, 22 nt, Artificial Sequence
  LDLR targeting guide sequence portion
uuggggaagugaauggcuugga

SEQ ID NO: 10637 - RNA, 22 nt, Artificial Sequence
  LDLR targeting guide sequence portion
uuggguugggauuuugguuucu

SEQ ID NO: 10638 - RNA, 22 nt, Artificial Sequence
  LDLR targeting guide sequence portion
uuggucucggugccaccacgga

SEQ ID NO: 10639 - RNA, 22 nt, Artificial Sequence
  LDLR targeting guide sequence portion
uuggucuucucugucuuugaau

SEQ ID NO: 10640 - RNA, 22 nt, Artificial Sequence
  LDLR targeting guide sequence portion
uuggugaaugaguuuggucucg

SEQ ID NO: 10641 - RNA, 22 nt, Artificial Sequence
  LDLR targeting guide sequence portion
uuggugccaucugcuguugugu

SEQ ID NO: 10642 - RNA, 22 nt, Artificial Sequence
  LDLR targeting guide sequence portion
uugguggaugaggcagggccag

SEQ ID NO: 10643 - RNA, 22 nt, Artificial Sequence
  LDLR targeting guide sequence portion
uugguuucuuccuuuccucgug

SEQ ID NO: 10644 - RNA, 22 nt, Artificial Sequence
  LDLR targeting guide sequence portion
uugguuuuuguagagaugggau

SEQ ID NO: 10645 - RNA, 22 nt, Artificial Sequence
  LDLR targeting guide sequence portion
uuguacacuguguacauuuggc

SEQ ID NO: 10646 - RNA, 22 nt, Artificial Sequence
  LDLR targeting guide sequence portion
uuguacauaaagaagaggcauu

SEQ ID NO: 10647 - RNA, 22 nt, Artificial Sequence
  LDLR targeting guide sequence portion
uuguaccuuccuuaagccagga

SEQ ID NO: 10648 - RNA, 22 nt, Artificial Sequence
  LDLR targeting guide sequence portion
uuguagccugaaugucuuacug

SEQ ID NO: 10649 - RNA, 22 nt, Artificial Sequence
  LDLR targeting guide sequence portion
uuguauguaugaguggcuucug

SEQ ID NO: 10650 - RNA, 22 nt, Artificial Sequence
  LDLR targeting guide sequence portion
uuguauuucugaaauagggucu

SEQ ID NO: 10651 - RNA, 22 nt, Artificial Sequence
  LDLR targeting guide sequence portion
uuguccccagggacaaaacacu

SEQ ID NO: 10652 - RNA, 22 nt, Artificial Sequence
  LDLR targeting guide sequence portion
uugucccuggggacaauugcca

SEQ ID NO: 10653 - RNA, 22 nt, Artificial Sequence
  LDLR targeting guide sequence portion
uugucgucuuuauguccgccca

SEQ ID NO: 10654 - RNA, 22 nt, Artificial Sequence
  LDLR targeting guide sequence portion
uugucguugauggguauguguu

SEQ ID NO: 10655 - RNA, 22 nt, Artificial Sequence
  LDLR targeting guide sequence portion
uugugacaucuucacgcgggag

SEQ ID NO: 10656 - RNA, 22 nt, Artificial Sequence
  LDLR targeting guide sequence portion
uugugucacgguggagagaaac

SEQ ID NO: 10657 - RNA, 22 nt, Artificial Sequence
  LDLR targeting guide sequence portion
uuguguguugaaagccacuugc

SEQ ID NO: 10658 - RNA, 22 nt, Artificial Sequence
  LDLR targeting guide sequence portion
uuguucagugacuauucucggg

SEQ ID NO: 10659 - RNA, 22 nt, Artificial Sequence
  LDLR targeting guide sequence portion
uuguugcucaggccuggucucc

SEQ ID NO: 10660 - RNA, 22 nt, Artificial Sequence
  LDLR targeting guide sequence portion
uuguuuuauucaaagacagaga

SEQ ID NO: 10661 - RNA, 22 nt, Artificial Sequence
  LDLR targeting guide sequence portion
uuuaaaaagugacacccaucuc

SEQ ID NO: 10662 - RNA, 22 nt, Artificial Sequence
  LDLR targeting guide sequence portion
uuuaaaacaugcacggugaggc

SEQ ID NO: 10663 - RNA, 22 nt, Artificial Sequence
  LDLR targeting guide sequence portion
uuuaaacacauacccaucaacg

SEQ ID NO: 10664 - RNA, 22 nt, Artificial Sequence
  LDLR targeting guide sequence portion
uuuaauugaucacaguaagaca

SEQ ID NO: 10665 - RNA, 22 nt, Artificial Sequence
  LDLR targeting guide sequence portion
uuuaccucuucuaugcaagccu

SEQ ID NO: 10666 - RNA, 22 nt, Artificial Sequence
  LDLR targeting guide sequence portion
uuuacgugcuccgaaaccagaa

SEQ ID NO: 10667 - RNA, 22 nt, Artificial Sequence
  LDLR targeting guide sequence portion
uuuagggguuuggcuuagagau

SEQ ID NO: 10668 - RNA, 22 nt, Artificial Sequence
  LDLR targeting guide sequence portion
uuuauauauuuauucaucuggg

SEQ ID NO: 10669 - RNA, 22 nt, Artificial Sequence
  LDLR targeting guide sequence portion
uuuauguccgcccaccuagugc

SEQ ID NO: 10670 - RNA, 22 nt, Artificial Sequence
  LDLR targeting guide sequence portion
uuuauuaagugccugagacacc

SEQ ID NO: 10671 - RNA, 22 nt, Artificial Sequence
  LDLR targeting guide sequence portion
uuuauucaaagacagagaagac

SEQ ID NO: 10672 - RNA, 22 nt, Artificial Sequence
  LDLR targeting guide sequence portion
uuuauucaucugggaggcagaa

SEQ ID NO: 10673 - RNA, 22 nt, Artificial Sequence
  LDLR targeting guide sequence portion
uuuauuuuugcaaacccugguu

SEQ ID NO: 10674 - RNA, 22 nt, Artificial Sequence
  LDLR targeting guide sequence portion
uuucaacacacaacagcagaug

SEQ ID NO: 10675 - RNA, 22 nt, Artificial Sequence
  LDLR targeting guide sequence portion
uuucagaaagaaccugaagucc

SEQ ID NO: 10676 - RNA, 22 nt, Artificial Sequence
  LDLR targeting guide sequence portion
uuucagaggcaauaacccccua

SEQ ID NO: 10677 - RNA, 22 nt, Artificial Sequence
  LDLR targeting guide sequence portion
uuucaucuuccauguuugagga

SEQ ID NO: 10678 - RNA, 22 nt, Artificial Sequence
  LDLR targeting guide sequence portion
uuucccuggccugggaucccau

SEQ ID NO: 10679 - RNA, 22 nt, Artificial Sequence
  LDLR targeting guide sequence portion
uuuccgacgccaugaaucccuu

SEQ ID NO: 10680 - RNA, 22 nt, Artificial Sequence
  LDLR targeting guide sequence portion
uuuccucgugaaggauaagaga

SEQ ID NO: 10681 - RNA, 22 nt, Artificial Sequence
  LDLR targeting guide sequence portion
uuuccuggcuuaaggaagguac

SEQ ID NO: 10682 - RNA, 22 nt, Artificial Sequence
  LDLR targeting guide sequence portion
uuucgagguggguuuguaccuu

SEQ ID NO: 10683 - RNA, 22 nt, Artificial Sequence
  LDLR targeting guide sequence portion
uuucggagcacguaaaugcguc

SEQ ID NO: 10684 - RNA, 22 nt, Artificial Sequence
  LDLR targeting guide sequence portion
uuucucaguucagaguuguaca

SEQ ID NO: 10685 - RNA, 22 nt, Artificial Sequence
  LDLR targeting guide sequence portion
uuucucuccaccgugacacaau

SEQ ID NO: 10686 - RNA, 22 nt, Artificial Sequence
  LDLR targeting guide sequence portion
uuucucuccaggaaguuuugag

SEQ ID NO: 10687 - RNA, 22 nt, Artificial Sequence
  LDLR targeting guide sequence portion
uuucucuuauccuucacgagga

SEQ ID NO: 10688 - RNA, 22 nt, Artificial Sequence
  LDLR targeting guide sequence portion
uuucugaaauagggucuucauc

SEQ ID NO: 10689 - RNA, 22 nt, Artificial Sequence
  LDLR targeting guide sequence portion
uuucugaaaucgccguguuacu

SEQ ID NO: 10690 - RNA, 22 nt, Artificial Sequence
  LDLR targeting guide sequence portion
uuucugguuucggagcacguaa

SEQ ID NO: 10691 - RNA, 22 nt, Artificial Sequence
  LDLR targeting guide sequence portion
uuucugucguguguguugggau

SEQ ID NO: 10692 - RNA, 22 nt, Artificial Sequence
  LDLR targeting guide sequence portion
uuucuuccuuuccucgugaagg

SEQ ID NO: 10693 - RNA, 22 nt, Artificial Sequence
  LDLR targeting guide sequence portion
uuugaagucccggucaaccugc

SEQ ID NO: 10694 - RNA, 22 nt, Artificial Sequence
  LDLR targeting guide sequence portion
uuugaauaaaacaaggccggcg

SEQ ID NO: 10695 - RNA, 22 nt, Artificial Sequence
  LDLR targeting guide sequence portion
uuugacgggacuucagguucuu

SEQ ID NO: 10696 - RNA, 22 nt, Artificial Sequence
  LDLR targeting guide sequence portion
uuugagcucaggcauuugaggc

SEQ ID NO: 10697 - RNA, 22 nt, Artificial Sequence
  LDLR targeting guide sequence portion
uuugaggauugugucacggugg

SEQ ID NO: 10698 - RNA, 22 nt, Artificial Sequence
  LDLR targeting guide sequence portion
uuugaggcugucgugagcuaug

SEQ ID NO: 10699 - RNA, 22 nt, Artificial Sequence
  LDLR targeting guide sequence portion
uuugaguuucucuccaccguga

SEQ ID NO: 10700 - RNA, 22 nt, Artificial Sequence
  LDLR targeting guide sequence portion
uuugcaaacccugguugcugua

SEQ ID NO: 10701 - RNA, 22 nt, Artificial Sequence
  LDLR targeting guide sequence portion
uuugcacgaacuggacugugug

SEQ ID NO: 10702 - RNA, 22 nt, Artificial Sequence
  LDLR targeting guide sequence portion
uuugcacuguuuucugucgugu

SEQ ID NO: 10703 - RNA, 22 nt, Artificial Sequence
  LDLR targeting guide sequence portion
uuugcacuuuguauauugguug

SEQ ID NO: 10704 - RNA, 22 nt, Artificial Sequence
  LDLR targeting guide sequence portion
uuugcauagaaguggaagcacu

SEQ ID NO: 10705 - RNA, 22 nt, Artificial Sequence
  LDLR targeting guide sequence portion
uuugcccugucacccccgaauc

SEQ ID NO: 10706 - RNA, 22 nt, Artificial Sequence
  LDLR targeting guide sequence portion
uuuggccagacacaggugccuc

SEQ ID NO: 10707 - RNA, 22 nt, Artificial Sequence
  LDLR targeting guide sequence portion
uuuggcuuagagauugguggau

SEQ ID NO: 10708 - RNA, 22 nt, Artificial Sequence
  LDLR targeting guide sequence portion
uuugggagaaugauguccccgu

SEQ ID NO: 10709 - RNA, 22 nt, Artificial Sequence
  LDLR targeting guide sequence portion
uuugggaggcugagcuggauca

SEQ ID NO: 10710 - RNA, 22 nt, Artificial Sequence
  LDLR targeting guide sequence portion
uuuggucucggugccaccacgg

SEQ ID NO: 10711 - RNA, 22 nt, Artificial Sequence
  LDLR targeting guide sequence portion
uuuggucuucucugucuuugaa

SEQ ID NO: 10712 - RNA, 22 nt, Artificial Sequence
  LDLR targeting guide sequence portion
uuuggugaaugaguuuggucuc

SEQ ID NO: 10713 - RNA, 22 nt, Artificial Sequence
  LDLR targeting guide sequence portion
uuugguuucuuccuuuccucgu

SEQ ID NO: 10714 - RNA, 22 nt, Artificial Sequence
  LDLR targeting guide sequence portion
uuugguuuuuguagagauggga

SEQ ID NO: 10715 - RNA, 22 nt, Artificial Sequence
  LDLR targeting guide sequence portion
uuuguacauaaagaagaggcau

SEQ ID NO: 10716 - RNA, 22 nt, Artificial Sequence
  LDLR targeting guide sequence portion
uuuguaccuuccuuaagccagg

SEQ ID NO: 10717 - RNA, 22 nt, Artificial Sequence
  LDLR targeting guide sequence portion
uuuguagccugaaugucuuacu

SEQ ID NO: 10718 - RNA, 22 nt, Artificial Sequence
  LDLR targeting guide sequence portion
uuugucccuggggacaauugcc

SEQ ID NO: 10719 - RNA, 22 nt, Artificial Sequence
  LDLR targeting guide sequence portion
uuuguucagugacuauucucgg

SEQ ID NO: 10720 - RNA, 22 nt, Artificial Sequence
  LDLR targeting guide sequence portion
uuuguugcucaggccuggucuc

SEQ ID NO: 10721 - RNA, 22 nt, Artificial Sequence
  LDLR targeting guide sequence portion
uuuuaaacacauacccaucaac

SEQ ID NO: 10722 - RNA, 22 nt, Artificial Sequence
  LDLR targeting guide sequence portion
uuuuauucaaagacagagaaga

SEQ ID NO: 10723 - RNA, 22 nt, Artificial Sequence
  LDLR targeting guide sequence portion
uuuucugucguguguguuggga

SEQ ID NO: 10724 - RNA, 22 nt, Artificial Sequence
  LDLR targeting guide sequence portion
uuuugaguuucucuccaccgug

SEQ ID NO: 10725 - RNA, 22 nt, Artificial Sequence
  LDLR targeting guide sequence portion
uuuugcaaacccugguugcugu

SEQ ID NO: 10726 - RNA, 22 nt, Artificial Sequence
  LDLR targeting guide sequence portion
uuuugcacuguuuucugucgug

SEQ ID NO: 10727 - RNA, 22 nt, Artificial Sequence
  LDLR targeting guide sequence portion
uuuugggagaaugauguccccg

SEQ ID NO: 10728 - RNA, 22 nt, Artificial Sequence
  LDLR targeting guide sequence portion
uuuugguuucuuccuuuccucg

SEQ ID NO: 10729 - RNA, 22 nt, Artificial Sequence
  LDLR targeting guide sequence portion
uuuugguuuuuguagagauggg

SEQ ID NO: 10730 - RNA, 22 nt, Artificial Sequence
  LDLR targeting guide sequence portion
uuuuguagccugaaugucuuac

SEQ ID NO: 10731 - RNA, 22 nt, Artificial Sequence
  LDLR targeting guide sequence portion
uuuugucccuggggacaauugc

SEQ ID NO: 10732 - RNA, 22 nt, Artificial Sequence
  LDLR targeting guide sequence portion
uuuuugcaaacccugguugcug

SEQ ID NO: 10733 - RNA, 22 nt, Artificial Sequence
  LDLR targeting guide sequence portion
uuuuugggagaaugaugucccc

SEQ ID NO: 10734 - RNA, 22 nt, Artificial Sequence
  LDLR targeting guide sequence portion
uuuuugguuuuuguagagaugg

SEQ ID NO: 10735 - RNA, 22 nt, Artificial Sequence
  LDLR targeting guide sequence portion
uuuuuguagccugaaugucuua

SEQ ID NO: 10736 - RNA, 20 nt, Artificial Sequence
  LDLR targeting guide sequence portion
uaggcuugugggacacuaca

SEQ ID NO: 10737 - RNA, 20 nt, Artificial Sequence
  LDLR targeting guide sequence portion
gagcaacacagagcccaggg

SEQ ID NO: 10738 - RNA, 20 nt, Artificial Sequence
  LDLR targeting guide sequence portion
gugcguugcuuugagugggu

SEQ ID NO: 10739 - RNA, 20 nt, Artificial Sequence
  Example guide sequence portion
aaaaaaauguacuugguucc

SEQ ID NO: 10740 - RNA, 17 nt, Artificial Sequence
  17 nucleotide guide sequence 1
aaaauguacuugguucc

SEQ ID NO: 10741 - RNA, 17 nt, Artificial Sequence
  17 nucleotide guide sequence 2
aaaaauguacuugguuc

SEQ ID NO: 10742 - RNA, 17 nt, Artificial Sequence
  17 nucleotide guide sequence 3
aaaaaauguacuugguu

SEQ ID NO: 10743 - RNA, 17 nt, Artificial Sequence
  17 nucleotide guide sequence 4
aaaaaaauguacuuggu

SEQ ID NO: 10744 - protein, 1062 aa, Artificial Sequence
  OMNI-79 CRISPR Nuclease
MEKRLGLDIGTNSIGWCLYEGDSILDIGVRIFSDGRDPKSGASLAVDRRNARAMRRRRDRYLGRRSALIKALKAHGLFPAEQDAAKALEREDPYSLRVRALDHRLDPHQIGRAIFHLNQRRGFRSNRKADRVLGDQESGLISTATRVLDEAMAKSGARTLGEFLASRDTRRVRMRPDVKGYDFYPNRQHYLEEFEKIWDAQSQYHPDLLSQQAKSAIHRIIFHQRPLKPQAVGTCTFAGLHGIPGDETRLPKAHPLFQQRRLYEEVNQLEIVCASAPARKLTRDERDALILKLQDKKKVTFSTLARTIRLKEGERFNKESENRKDLAGDEVRAEMSDKTRFGRRWFHLSLDEQWSVIDRLLNEESTEDLLAWLEKEWSLPSDVAEAVANAHLPDGHGRFGLTATVRLLEHLKADVVTYAEAARRAGFHHSDFRDGACYDELPYYGEILSREIAPGKDEYGDPLERQWGKITNPTVHIGLNQLRRLINALVRRHGRPDFIFVELARELKLNEKQKADHKRRIKQTTDAARARAEKLREIGQRDSGSNRMLLRIWEELNPSNPLDRRCPYCAEPISIEMLMSGSADIDHIVPYSRCLDDSAANKVVAHNHCNRQKGNRTPWEQWGQTTRWPLIQEQVARMHRSKQWRFGPDAMERVDRDGGFIARQLTDTQYLSRIAAQYLSALYTPDEGRRVYAVTGRLTAMLRRLWGLNDILPDHNWVLNPHSNAPKNRLDHRHHAIDAAVVGATTPAMIQQVARAAARAEEQDLDRLFADLPPPWPGFREELQGRIMAAVVSHKPDHGRKGRPLPGRDSTSGRLHNDTAYGFTGRRNAKGMPIVVTRKPLLALKPEDLTDPERIPDPALQGALFEATRGATGKDFEKALRDFSRRDGPYQGIRRIRLTEALNVIPIRDRTGHAYKGVKGDANARFDVWRLPDGKWITRWKDRDGIEHSGIVSLFDAHQPSQVYHRPHPAAKKVLSLRQNDLVAVEHDGDPGKIMRVVKFSANGSITFAPHNEAGPLKTRDTDPADPFRYVTTVASGLKKMRARQVRIDELGKVHDPGPRED

SEQ ID NO: 10745 - protein, 1062 aa, Artificial Sequence
  OMNI-79 V5570 CRISPR Nuclease
MEKRLGLDIGTNSLGWCLYEGDSILDIGVRIFSDGRDPKSGASLAVDRRNARAMRRRRDRYLGRRSALIKALKAHGLFPAEQDAAKALEREDPYSLRVRALDHRLDPHQIGRAIFHLNQRRGFRSNRKADRVLGDQESGLISTATRVLDEAMAKSGARTLGEFLASRDTRRVRMRPDVKGYDFYPNRQHYLEEFEKIWDAQSQYHPDLLSQQAKSAIHRIIFHQRPLKPQAVGTCTFAGLHGIPGDETRLPKAHPLFQQRRLYEEVNQLEIVCASAPARKLTRDERDALILKLQDKKKVTFSTLARTIRLKEGERFNKESENRKDLAGDEVRAEMSDKTRFGRRWFHLSLDEQWSVIDRLLNEESTEDLLAWLEKEWSLPSDVAEAVANAHLPDGHGRFGLTATVRLLEHLKADVVTYAEAARRAGFHHSDFRDGACYDELPYYGEILSREIAPGKDEYGDPLERQWGKITNPTVHIGLNQLRRLINALVRRHGRPDFIFVELARELKLNEKQKADHKRRIKQTTDAARARAEKLREIGQRDSGSNRMLLRIWEELNPSNPLDRRCPYCAEPISIEMLMSGSADIDHIVPYSRCLDDSAANKVVAHNHCNRQKGNRTPWEQWGQTTRWPLIQEQVARMHRSKQWRFGPDAMERVDRDGGFIARQLTDTQYLSRIAAQYLSALYTPDEGRRVYAVTGRLTAMLRRLWGLNDILPDHNWVLNPHSNAPKNRLDHRHHAIDAAVVGATTPAMIQQVARAAARAEEQDLDRLFADLPPPWPGFREELQGRIMAAVVSHKPDHGRKGRPLPGRDSTSGRLHNDTAYGFTGRRNAKGMPIVVTRKPLLALKPEDLTDPERIPDPALQGALFEATRGATGKDFEKALRDFSRRDGPYQGIRRIRLTEALNVIPIRDRTGHAYKGVKGDANARFDVWRLPDGKWITRWKDRDGIEHSGIVSLFDAHQPSQVYHRPHPAAKKVLSLRQNDLVAVEHDGDPGKIMRVVKFSANGRITFAPHNEAGPLKTRDTDPADPFRYVTTVASGLKKMRARQVRIDELGKVHDPGPRED

SEQ ID NO: 10746 - protein, 1348 aa, Artificial Sequence
  OMNI-103 CRISPR Nuclease
MSIKSDYFLGLDIGTDSIGWAVTDPEYHILRRKGKALWGIRLFDAANTAAERRTFRTSRRRIQRRRQRIRLLQELFAEEMVKLDPGFFQRLSDSAFWQEDKQEQQIYSLFTCENYTDVDYYREYPTIYHLRSALIQEKKEFDLRLLYLALHHLMKHRGHFLFNGSINNVTSFHTTFQTFADCLYDEFDIELECDSEDRFAEILKDKHARKTGKCSELEIICHIEKSNKQLKELFKLITGMKASLSVVFGDDELAEIEHNKISFSESSYDEVRLALEDEIQERTGILDIFHAVYSWAILADILEGGEYEGNSYLSVAKVSTYKKHGDDLRLLRTLVREYCPDHYKSFFSVSGKENYCAYAGTLKKNGKKQPIKRCSQEDFYKALKKLLNQMPTEQPEVKDIFIEIENGTFLPLQVSKDNGVIPYQVNKMELEKILQNAEEYLPFLKNIDEECGKTVSKKIIDLFEFRIPYYVGPLNTAKGENCWMVRKEAGRIYPWNFDEKVDRDQSAEKFIRRMTNQCTYLIHEDVVPKNSLLYSEFMVLNELNNVKIRSEKLPVELKQAIVLDLFKKQKQITGKKLLNYLNANGYDVKKEDLSGFDGNFKSSLSSYLTLKKVFGEELDKYSVQQMAEDIILWITLYGDDQKMLRRVIRKHYEQQLSEEQILSLSKLKFQGWGRLSRRLLSEMEGVDCETGECMTVMQGLRNTQNNLMQLLSQQFSFMELIEEENGNYYVDEITYDNLVKDMVISPSVKRAVWQTVQIVEEIKGVMGCQPKKIFVEMARSDEEKKRTVSRKDRLLEAYDAIKDEARQWQEELQKYSDGDFKAIKLYLYYTQMGQCMYTGRKIDLSQLNDATVWDRDHIYPQSKTKDDSLDNLVLVDRSVNAKKSDGMLSPEIQQRMRATWKYLKEKKLISEKKYERLTRVSPLTDEELAGFINRQLVETRQSSKAVATLLKRVYDEAEIVYVKAEAVSNFRRDNLDYIKVRDLNDYHHAKDAYQNIVVGNVFHEKFTSNPLRWLKNNPNTKYSLNQMFNFDLEKNGVVIWKRGKAGSIKCVEETLKRNDILFTRYAFCNKGGFFNQMLTAAPEDKTKAKGLVPIKKGMETWKYGGYTSVTPSHFMLVASKDKKGKEIRTIETVPLYRWKEFKENPDALLQYCREFYGLKEPKVLIPCIKKNARLVVNGFPMHLKGSTGKQLILQGAVQLCLNNENIKYLKKVTKYLEYNAQRRDKRTLLEVREVTGINKEENIQLYDVFVDKLSNTIYQYRPANPKDNLIKGREKFIELGLAEQCVVLGEVLHLFQCKPLTSDLTLIGGSPNTGTIKITKTISNCNVVKLLSQSIAGVKVREINLLII

SEQ ID NO: 10747 - RNA, 74 nt, Artificial Sequence
  OMNI-79 and OMNI-79 V5570 sgRNA scaffold
guugccgcuggagaaauccaguuguuaacaagcagcuugacugcaccaaauaaggcgggggcugcggcccucgc

SEQ ID NO: 10748 - RNA, 107 nt, Artificial Sequence
  OMNI-103 sgRNA scaffold
guuugagaguaguguaagaaauuacacuacaaguucaaauaaaaauuuauucaaauccauuugcuacauuguguagaauuuaaagaucuggcaacagaucuuuuuuu

SEQ ID NO: 10749 - protein, 1370 aa, Ezakiella peruensis strain M6.X2
MTKVKDYYIGLDIGTSSVGWAVTDEAYNVLKFNSKKMWGVRLFDDAKTAEERRGQRGARRRLDRKKERLSLLQDFFAEEVAKVDPNFFLRLDNSDLYMEDKDQKLKSKYTLFNDKDFKDKNFHKKYPTIHHLLMDLIEDDSKKDIRLVYLACHYLLKNRGHFIFEGQKFDTKSSFENSLNELKVHLNDEYGLDLEFDNENLINILTDPKLNKTAKKKELKSVIGDTKFLKAVSAIMIGSSQKLVDLFENPEDFDDSAIKSVDFSTTSFDDKYSDYELALGDKIALVNILKEIYDSSILENLLKEADKSKDGNKYISNAFVKKYNKHGQDLKEFKRLVRQYHKSAYFDIFRSEKVNDNYVSYTKSSISNNKRVKANKFTDQEAFYKFAKKHLETIKYKINKVNGSKADLELIDGMLRDMEFKNFMPKIKSSDNGVIPYQLKLMELNKILENQSKHHEFLNVSDEYGSVCDKIASIMEFRIPYYVGPLNPNSKYAWIKKQKDSEITPWNFKDVVDLDSSREEFIDSLIGRCTYLKDEKVLPKASLLYNEYMVLNELNNLKLNDLPITEEMKKKIFDQLFKTRKKVTLKAVANLLKKEFNINGEILLSGTDGDFKQGLNSYNDFKAIVGDKVDSDDYRDKIEEIIKLIVLYGDDKSYLQKKIKAGYGKYFTDSEIKKMAGLNYKDWGRLSKKLLTGLEGANKITGERGSIIHFMREYNLNLMELMSASFTFTEEIQKLNPVDDRKLSYEMVDELYLSPSVKRMLWQSLRIVDEIKNIMGTDSKKIFIEMARGKEEVKARKESRKNQLLKFYKDGKKAFISEIGEERYSYLLSEIEGEEENKFRWDNLYLYYTQLGRCMYSLEPIDISELSSKNIYDQDHIYPKSKIYDDSIENRVLVKKDLNSKKGNSYPIPDEILNKNCYAYWKILYDKGLIGQKKYTRLTRRTGFTDDELVQFISRQIVETRQATKETANLLKTICKNSEIVYSKAENASRFRQEFDIVKCRAVNDLHHMHDAYINIIVGNVYNTKFTKDPMNFVKKQEKARSYNLENMFKYDVKRGGYTAWIADDEKGTVKNASIKRIRKELEGTNYRFTRMNYIESGALFNATLQRKNKGSRPLKDKGPKSSIEKYGGYTNINKACFAVLDIKSKNKIERKLMPVEREIYAKQKNDKKLSDEIFSKYLKDRFGIEDYRVVYPVVKMRTLLKIDGSYYFITGGSDKTLELRSALQLILPKKNEWAIKQIDKSSENDYLTIERIQDLTEELVYNTFDIIVNKFKTSVFKKSFLNLFQDDKIENIDFKFKSMDFKEKCKTLLMLVKAIRASGVRQDLKSIDLKSDYGRLSSKTNNIGNYQEFKIINQSITGLFENEVDLLKL

SEQ ID NO: 10750 - RNA, 112 nt, Artificial Sequence
  OMNI-50 sgRNA Scaffold
guuugagaguuauguaagaaauuacaugacgaguucaaauaaaaauuuauucaaaccgccuauuuauaggccgcagauguucugcauuaugcuugcuauugcaagcuuuuuu

SEQ ID NO: 10751 - DNA, 18 bp, Homo sapiens
gctgtgatggtggccccg

SEQ ID NO: 10752 - protein, 6 aa, Homo sapiens
RCDGGP

SEQ ID NO: 10753 - DNA, 34 bp, Homo sapiens
gctggcgctgtgatggtggccccgactgcaagga

SEQ ID NO: 10754 - DNA, 34 bp, Homo sapiens
cgaccgcgacactaccaccggggctgacgttcct

SEQ ID NO: 10755 - DNA, 16 bp, Homo sapiens
agtgaactggtgtgag

SEQ ID NO: 10756 - protein, 5 aa, Homo sapiens
VNWCE

SEQ ID NO: 10757 - DNA, 28 bp, Homo sapiens
ccagccaagaggagtgaactggtgtgag

SEQ ID NO: 10758 - DNA, 28 bp, Homo sapiens
ggtcggttctcctcacttgaccacactc

1. A method for increasing the endogenous expression of a Low-Density Lipoprotein Receptor (LDLR) gene in a cell, the method comprising modifying the LDLR gene or a transcript encoded by the LDLR gene.

2. The method of claim 1, wherein the LDLR gene is modified by a CRISPR nuclease, a meganuclease, a transcription activator-like effector nucleases (TALEN), or a zinc finger nuclease (ZFN), or wherein a transcript encoded by the LDLR gene is modified by a small interfering RNA (siRNA) , short hairpin RNA (shRNA) , or microRNA (miRNA) molecule; and/or
wherein the 3′ untranslated region (UTR) of the LDLR gene or the transcript encoded by the LDLR gene is modified; and/or
wherein a miRNA binding site or AU Rich region (AUR) of the LDLR gene in the cell is subjected to an insertion or deletion mutation; and/or
wherein the increase of the expression of an endogenous LDLR gene in a cell is measured by an at least 108, at least 25%, at least 508, at least 758, at least 100%, at least 1508, at least 2008, at least 2508, at least 3008, at least 3508, at least 400%, at least 4508, at least 500% increase, at least 550% increase, or at least 600% increase in LDLR transcript levels or LDLR protein levels relative to LDLR transcript levels or LDLR protein levels in the cell prior to modification of the LDLR gene; and/or wherein the increase of the expression of an endogenous LDLR gene results in an at least 108, at least 25%, at least 50%, at least 75%, at least 100%, at least 150%, at least 200%, at least 250%, at least 300%, at least 350%, at least 400%, at least 450%, or at least 500% increase in LDL-C uptake by the cell relative to the LDL-C uptake by the cell prior to modification of the LDLR gene.

3. (canceled)

4. The method of claim 2, wherein the 3′UTR of the LDLR gene is modified by excision of the 3′ UTR or a portion thereof.

5. The method of claim 1, the method comprises
introducing to the cell a composition comprising:
at least one CRISPR nuclease, or a nucleotide molecule encoding a CRISPR nuclease; and
an RNA molecule, or a DNA molecule encoding the RNA molecule, comprising a guide sequence portion,
wherein a complex of the CRISPR nuclease and the RNA molecule affects a double strand break in an allele of the LDLR gene, thereby increasing the expression of the LDLR gene.

6. The method of claim 5,
wherein the composition is introduced to a cell in a subject or to a cell in culture; and/or
wherein the cell is a liver cell, hepatocyte, or stem cell.

7. (canceled)

8. The method of claim 5,
wherein the CRISPR nuclease, or nucleotide molecule encoding the CRISPR nuclease, and the RNA molecule, or DNA molecule encoding the RNA molecule, are introduced to the cell at substantially the same time or at different times; and/or
wherein the guide sequence portion of the RNA molecule targets a site in the LDLR 3′UTR located at least 30 nucleotides downstream to the stop codon or at least 30 nucleotides upstream to the polyadenylation signal; and/or
wherein the guide sequence portion of the RNA molecule targets a miRNA binding site in a LDLR allele; and/or
wherein guide sequence portion of the RNA molecule targets a miR-85 or miR-148 binding site; and/or
wherein a complex of the CRISPR nuclease and the RNA molecule affects a double strand break in both alleles of the LDLR gene; and/or
wherein the guide sequence portion of the RNA molecule comprises 17-50 contiguous nucleotides containing nucleotides in the sequence set forth in any one of SEQ ID NOs: 1-10736; and/or
wherein the composition introduced to the cell further comprises a second RNA molecule, or a DNA sequence encoding the second RNA molecule, comprising a guide sequence portion; and/or wherein the guide sequence portion of the first RNA molecule or second RNA molecule comprises 1, 2, 3, 4, or 5 nucleotide mismatches relative to a fully complementary LDLR target sequence.

9-12. (canceled)

13. The method of claim 1,
wherein a miR seed sequence is inactivated as a result of the modifying of the LDLR gene.

14. The method of claim 13, wherein the miR seed sequence is UGGUGCUA or CACUGUG; or wherein the miR seed sequence is a miR-85 or miR-148 seed sequence.

15-18. (canceled)

19. The method of claim 8, wherein the composition introduced to the cell further comprises a second RNA molecule, or a DNA sequence encoding the second RNA molecule, comprising a guide sequence portion, and
wherein the guide sequence portion of the second RNA molecule targets a site in the LDLR 3′UTR located at least 30 nucleotides downstream to the stop codon or at least 30 nucleotides upstream to the polyadenylation signal; and/or
wherein the guide sequence portion of the second RNA molecule comprises 17-50 contiguous nucleotides containing nucleotides in the sequence set forth in any one of SEQ ID NOS: 1-10736 other than the sequence of the first RNA molecule; and/or
wherein a LDLR 3′UTR or a portion thereof is excised by a double strand break formed by a CRISPR nuclease and the first RNA molecule and a double strand break formed by a CRISPR nuclease and the second RNA molecule.

20-21. (canceled)

22. The method of claim 19, wherein a LDLR 3′UTR or a portion thereof is excised by a double strand break formed by a CRISPR nuclease and the first RNA molecule and a double strand break formed by a CRISPR nuclease and the second RNA molecule and wherein the endogenous LDLR polyadenylation signal remains intact.

23. (canceled)

24. The method of claim 23, wherein the guide sequence portion of the first RNA molecule or second RNA molecule comprises 1, 2, 3, 4, or 5 nucleotide mismatches relative to a fully complementary LDLR target sequence, and
wherein the guide sequence portion comprises 17-50 contiguous nucleotides containing nucleotides in the sequence set forth in any one of SEQ ID NOs: 1-10736 modified to contain 1, 2, 3, 4, or 5 nucleotide mismatches relative to a fully complementary LDLR target sequence; and/or
wherein the guide sequence portion provides higher targeting specificity to the complex of the CRISPR nuclease and the first RNA molecule relative to a guide sequence portion that has higher complementarity to the mutant allele of the LDLR gene.

25-27. (canceled)

28. A composition comprising an RNA molecule which comprises 17-50 contiguous nucleotides containing nucleotides in the sequence set forth in any one of SEQ ID NOs: 1-10736, or any one of SEQ ID NOS: 1-10736 modified to contain 1, 2, 3, 4, or 5 nucleotide mismatches relative to a fully complementary LDLR target sequence, or a DNA molecule encoding the RNA molecule.

29. The composition of claim 28, further comprising a CRISPR nuclease, or a nucleotide molecule encoding a CRISPR nuclease; and/or
further comprising a tracrRNA molecule; and/or
further comprising a second RNA molecule, or a DNA molecule encoding the second RNA molecule, comprising a guide sequence portion.

30-31. (canceled)

32. The composition of claim 28, further comprising a second RNA molecule, or a DNA molecule encoding the second RNA molecule, comprising a guide sequence portion, and
wherein a guide sequence portion of the second RNA targets a site in the LDLR 3′UTR located at least 30 nucleotides downstream to the stop codon or at least 30 nucleotides upstream to the polyadenylation signal; and/or
wherein the guide sequence portion of the second RNA molecule comprises 17-50 contiguous nucleotides containing nucleotides in the sequence set forth in any one of SEQ ID NOS: 1-10736 other than the sequence of the first RNA molecule, or any one of SEQ ID NOS: 1-10736 other than the sequence of the first RNA molecule modified to contain 1, 2, 3, 4, or 5 nucleotide mismatches relative to a fully complementary LDLR target sequence.

33. (canceled)

34. A cell modified by the method of claim 1.

35. A medicament comprising the composition of claim 28 for use in inactivating a LDLR allele in a cell, wherein the medicament is administered by delivering to the cell the composition of claim 28.

36. A method of treating, ameliorating, or preventing hypercholesterolemia, comprising delivering the composition of claim 28 to a subject experiencing or at risk of experiencing hypercholesterolemia.

37. A method of treating, ameliorating, or preventing hypercholesterolemia, wherein the modified cell of claim 34 is administered to a subject experiencing or at risk of experiencing hypercholesterolemia.

38. A kit for increasing LDLR expression in a cell, comprising the composition of claim 28 and instructions for delivering the composition to the cell.

39. A kit for treating or preventing hypercholesterolemia in a subject, comprising the composition of claim 28 and instructions for delivering the composition or modified cell to a subject experiencing or at risk of experiencing hypercholesterolemia.
